(19) United States
(12) Patent Application Publication
(10) Pub. No.: US 2024/0124875 A1
(43) Pub. Date: Apr. 18, 2024

(54) RNAI CONJUGATES AND USES THEREOF

(71) Applicant: Dicerna Pharmaceuticals, Inc., Lexington, MA (US)

(72) Inventors: Shanthi GANESH, Shrewsbury, MA (US); Marc ABRAMS, Natick, MA (US); Henryk T. DUDEK, Belmont, MA (US); Harini Sivagurunatha KRISHNAN, Lexington, MA (US)

(21) Appl. No.: 18/280,092

(22) PCT Filed: Mar. 4, 2022
(86) PCT No.: PCT/US2022/018911

§ 371 Date: Sep. 1, 2023

Related U.S. Application Data
(60) Provisional application No. 63/214,153, filed on Jun. 23, 2021.
(60) Provisional application No. 63/157,465, filed on Mar. 5, 2021.

(51) Int. Cl. C12N 15/113; A61K 31/713; A61K 47/54; A61P 35/00

(52) U.S. Cl. CPC C12N 15/113; A61K 31/713; A61K 47/542; A61P 35/00

(57) ABSTRACT

The subject matter disclosed herein is directed to modulating gene expression using siRNA compositions and methods directed to affecting key cell populations supporting the growth and metastasis of cancer to affect the beneficial treatment, remission or removal of the underlying tumor in a patient.

### CROSS-RELATED APPLICATIONS

[0001] This application claims the benefit of U.S. Provisional Patent Application Ser. No. 63/157,465 filed Mar. 5, 2021, and U.S. Provisional Patent Application Ser. No. 63/214,153, filed Jun. 23, 2021. The entire contents of which is incorporated herein by this reference.

### TECHNICAL FIELD

[0002] The disclosure relates to oligonucleotides or oligonucleotides linked to targeting moieties useful in the inhibition, remission, and/or controlling of cancer in patients. In certain embodiments, the disclosure relates to methods of administering to subjects in need thereof a therapeutically effective amount of one or more RNAi oligonucleotides, or one or more RNAi molecules, that inhibit signal transducer and activator of transcription 3 (“STAT3”) expression in a subject.

### BACKGROUND OF THE DISCLOSURE

[0003] The growth and progression of cancer is influenced by many factors including the tumor microenvironment (“TME”) which contains components which may control, influence, or enhance tumor development, including blood vessels, immune cells, fibroblasts, bone marrow-derived inflammatory cells, signaling molecules and the extracellular matrix (Yin et al., INT J. CANCER (2019) 144(5):933-46). Despite the existing heterogeneity of various tumors, the development of a tumor is highly dependent upon the physiological state of the TME. Although tumors may come from a variety of anatomical locations and/or cell populations the tumor itself will have many common features that can be used to derive treatment protocols for the tumor. This is particularly true for the TME maturation of epithelial-derived tumors. Genetic alterations in tumor cells result in hyperplasia, uncontrolled growth, resistance to apoptosis, and a metabolic shift towards anaerobic glycolysis (the so-called “Warburg Effect”). These events create hypoxia, oxidative stress, and acidosis within the TME triggering an adjustment of the extracellular matrix (ECM) surrounding the altered or cancerous cells, a response from neighboring stromal cells (e.g., fibroblasts) and immune cells (lymphocytes and macrophages), inducing angiogenesis and, ultimately, resulting in metastasis. The TME profile itself also directly impacts the efficacy of anti-cancer therapies (Giraldo et al., BR. J. CANCER (2019) 120: 45-53).

[0004] Currently, chemotherapy is the leading cancer therapy worldwide, often combined with surgery, or surgery and radiotherapy, depending on tumor type and stage (Abbas et al., AN OVERVIEW OF CANCER TREATMENT MODALITIES/INTECHOPEN, 2018). Since the discovery of several important mutations that contribute to carcinogenesis (e.g., epidermal cell alterations (Yamaoka et al., INT. J. MOL. SCI. (2017) 18(11): 2420)) these mutations and the proteins they represent have been extensively used as targets for the development of more selective drugs and drug combinations to treat cancer patients. Despite the effectiveness of these drugs, multidrug resistance (MDR) is often seen in patients, which often results in tumor relapse, limited therapeutic options and low quality of life for patients. In addition, cancer research has often been focused on tumor cells even though the effect of the TME and the ‘normal’ or non-cancerous cells within it that have been shown to play a key role in tumor progression, development and MDR (Klemm et al., TRENDS CELL BIOL (2015) 25(4): 198-213).

[0005] At a late stage in development for a solid tumor, the tumor microenvironment is highly complex and heterogeneous (Runa et al., CURR MOL BIOL REP (2017) 3(4): 218-29). The interplay between cancer cells and neighboring cells, including stromal and immune system cells (which frequently appear due to inflammation at the tumor location) results in additional alterations in the TME as well as cellular components, the extracellular matrix, and the formation of vascularization systems, all of which contribute to the metastasis of the tumor (Runa et al., CURR MOL BIOL REP (2017) 3(4): 218-29). During tumor growth, cancer cells and TME constituents are continually adapting to the environment conditions, influencing the overall tumor growth. Accordingly, novel therapies that target different facets of the TME that contribute to tumor growth are needed.

### BRIEF SUMMARY OF THE DISCLOSURE

[0006] The TME is a complex system of blood vessels, immune cells, fibroblasts, signaling molecules and the extracellular matrix that interact with tumor tissue. Tumor progression is influenced by interactions of cancer cells with their environment that ultimately determine whether the primary tumor is eradicated, metastasizes or establishes dormant micro metastases. The TME can also impact therapeutic responses and drug or treatment resistance. Cancer cells debilitate antitumor immune responses and create an immunosuppressive environment. Thus, there exists an ongoing need to develop therapeutics capable of overcoming this immunosuppressive environment and/or sensitizing cancer cells to anticancer therapeutics to improve patient outcomes.

[0007] The present disclosure provides novel nucleic acids, oligonucleotides or analogues thereof comprising targeting ligands such as hydrophobic ligands, including but not limited to adamantyl and lipid conjugates, which are useful to target immune cells in the TME for therapeutic intervention. The present disclosure relates to nucleic acid-ligand conjugates and oligonucleotide-ligand conjugates, which function to modulate the expression of a target gene in a cell (e.g., an immune cell in a tumor microenvironment), and methods of preparation and uses thereof. Without wishing to be bound by theory, attachment of lipophilic/hydrophobic moieties, such as fatty acids and adamantyl group, to these highly hydrophilic nucleic acids/oligonucleotides substantially enhance plasma protein binding and consequently circulation half-life. As demonstrated herein, incorporation of a hydrophobic moiety such as a lipid facilitates systemic delivery of the novel nucleic acids, oligonucleotides, or analogues thereof into immune cell populations in a tumor microenvironment.

[0008] Suitable nucleic acid-ligand conjugates and oligonucleotide-ligand conjugates include nucleic acid inhibitor molecules, such as dsRNA inhibitor molecules, dsRNAi inhibitor molecules, antisense oligonucleotides, miRNA, ribozymes, antagomirs, aptamers, and single-stranded RNAi inhibitor molecules. In some aspects, the present disclosure provides nucleic acid-lipid conjugates, oligonucleotide-lipid conjugates, and analogues thereof, which find utility as modulators of intracellular RNA levels. Nucleic acid inhibitor molecules of the disclosure modulate RNA expression through a diverse set of mechanisms, for example by RNA interference (RNAi). An advantage of the nucleic acid-ligand conjugates, oligonucleotide-ligand conjugates and analogues thereof provided herein is that a broad range of pharmacological activities is possible, consistent with the modulation of intracellular RNA levels. In addition, the disclosure provides methods of using an effective amount of the conjugates described herein for the treatment or amelioration of a disease condition by modulating the intracellular RNA levels.

[0009] In some aspects, the present disclosure relates to oligonucleotide-ligand conjugates comprising one or more nucleic acid-ligand conjugate units that modulate target gene expression in an immune cell in the tumor microenvironment via RNA interference (RNAi). In some aspects, the present disclosure relates to oligonucleotide-ligand conjugates comprising one or more hydrophobic moiety ligand(s), including, but not limited to, lipid moieties, that modulate (e.g., reduce or inhibit) target gene expression in an immune cell in the tumor microenvironment, compositions of said oligonucleotide-ligand conjugates, and methods of preparation and uses thereof. In some aspects, the oligonucleotide-ligand conjugates target a gene encoding a regulator of immune suppression, such that reducing or inhibiting expression of the regulator overcomes an immunosuppressive tumor microenvironment. In some embodiments, reducing or inhibiting expression of the regulator induces or enhances an antitumor immune response.

[0010] The present disclosure is based, at least in part, on the discovery of oligonucleotide-ligand conjugates that effectively reduce target gene expression in immune cells present within a tumor microenvironment. Without being bound by theory, as described herein, a hydrophobic moiety (e.g., lipid) facilitates delivery and distribution of an RNAi oligonucleotide-lipid conjugate into immune cells, such as those expressing lipid trafficking receptors, of the tumor microenvironment, thereby increasing efficacy and durability of gene knockdown. Accordingly, the disclosure provides methods of treating cancer and/or reducing tumor growth by modulating target gene expression, e.g., of a gene encoding a regulator of immune suppression, in immune cells within a tumor microenvironment by administering the oligonucleotide ligand conjugates of the disclosure, and pharmaceutically acceptable compositions thereof, as described herein. The disclosure further provides methods of using the oligonucleotide ligand conjugates in the manufacture of a medicament for treating cancer and/or reducing tumor growth by modulating target gene expression in immune cells in a tumor microenvironment.

[0011] In some aspects, the disclosure provides a method of treating, ameliorating, or preventing cancer, and/or preventing metastasis of cancer in a subject in need thereof. The disclosure further provides RNAi oligonucleotide molecules that can limit, control, or eliminate the expression of key genes associated with cancer and/or an immune suppressive tumor microenvironment. Such RNAi oligonucleotide molecules are a variety of double-stranded RNAi oligonucleotides that target signal transducer and activator of transcription 3 (STAT3). In certain embodiments, the method comprises administering to the subject a therapeutically effective amount of a composition that inhibits STAT3 expression or activity in the subject. Such RNAi oligonucleotide molecules are used to treat a subject having cancer and associated pathologies and may thereby therapeutically benefit a subject suffering from carcinoma, sarcoma, melanoma, lymphoma, and leukemia, prostate cancer, breast cancer, hepatocellular carcinoma (HCC), colorectal cancer, and glioblastoma.

[0012] STAT3 is an important transcription factor that is crucial for then maintenance of carcinogenesis and for chemoresistance to anticancer agents. STAT3 is found in the cytoplasm and is activated in response to stimuli from the cytokines. Activated STAT3 regulates the transcription of genes controlling cell survival and proliferation and regulates the expression of antiapoptotic and immune response genes. Constitutive activation of STAT3 is necessary for the proliferation and survival of different cancers (Groner, B. et al, SEMINARS IN CELL & DEVELOPMENTAL BIOLOGY, Vol. 19(4): 341-50 (2008)). Activation of STAT-3 provides an advantage for survival of the cancer cells. Like NF-κB, the inhibition of STAT-3 in different cancer types has been demonstrated to induce apoptosis and chemosensitization of cells (da Hora, C. C. et al. CELL DEATH DISCOV, Vol. 5(72) https://doi.org/10.1038/s41420-019-0155-9 (2019)). The mRNA sequence of human STAT3 (NM_001369512.1) is set forth as SEQ ID NO:85 or SEQ ID NO: 1217 (NM_139276.3).

[0013] Accordingly, in one aspect, the disclosure provides an oligonucleotide-ligand conjugate comprising a nucleotide sequence that reduces expression of a target mRNA in an immune cell associated with a tumor microenvironment and one or more targeting ligands, wherein one or more nucleosides of the nucleotide sequence conjugated with one or more targeting ligands is represented by formula I-a:

[chemical structure]

or a pharmaceutically acceptable salt thereof, wherein each variable is as defined and described herein.

[0014] In another aspect, the present disclosure provides an oligonucleotide-ligand conjugate comprising a nucleotide sequence that reduces expression of a target mRNA in an immune cell associated with a tumor microenvironment and one or more targeting ligands, wherein one or more nucleosides of the nucleotide sequence conjugated with one or more targeting ligands is represented by formula II-a:

[chemical structure]

or a pharmaceutically acceptable salt thereof, wherein each variable is as defined and described herein.

[0015] In certain embodiments, the oligonucleotide-ligand conjugates are represented by formula II-b, II-c, II-Ib or II-Ic:

[chemical structure]

or a pharmaceutically acceptable salt thereof.

[0016] In any of the foregoing or related aspects, R⁵ is a saturated or unsaturated, straight or branched C1-C50 hydrocarbon chain. In some aspects, R⁵ is a saturated or unsaturated, straight or branched C8-C30 hydrocarbon chain. In some aspects, R⁵ is a saturated or unsaturated, straight or branched C16 hydrocarbon chain. In some aspects, R⁵ is a saturated or unsaturated, straight or branched C18 hydrocarbon chain.

[0017] In any of the foregoing or related aspects, the oligonucleotide-ligand conjugate comprises an antisense strand of 15 to 30 nucleotides and a sense strand of 15 to 40 nucleotide, wherein the sense and antisense strands form a duplex region, wherein the antisense strand comprises a region of complementarity to a target sequence expressed in an immune cell associated with a tumor microenvironment, wherein the sense strand comprises at its 3′ end a stem-loop comprising a tetraloop comprising 4 nucleosides, wherein one or more of the 4 nucleosides conjugated with the targeting ligand is represented by formula II-Ib:

[chemical structure]

wherein B is selected from an adenine and a guanine nucleobase, and wherein R⁵ is a hydrocarbon chain. In some aspects, wherein the 4 nucleosides of the tetraloop are numbered 1-4 from 5′ to 3′, and wherein position 1 is represented by formula II-Ib. In other aspects, position 2 is represented by formula II-Ib. In yet other aspects, position 3 is represented by formula II-Ib. In further aspects, position 4 is represented by formula II-Ib.

[0018] In any of the foregoing or related aspects, the target mRNA encodes a regulator of immune suppression. In some aspects, the regulator of immune suppression is a checkpoint inhibitor polypeptide. In some aspects, the regulator of immune suppression is a transcription factor.

[0019] In any of the foregoing or related aspects, the immune cell associated with a tumor microenvironment is a myeloid cell. In some aspects, the immune cell associated with a tumor microenvironment is a T cell. In some aspects, the nucleotide sequence reduces expression of the target mRNA in more than one immune cell associated with the tumor microenvironment. In some aspects, the immune cell is a myeloid cell or a T cell. In some aspects, the myeloid cell is a myeloid derived suppressor cell (MDSC). In some aspects, the MDSC is a granulocytic MDSC (G-MDSC) or monocytic MDSC (M-MDSC). In some aspects, the nucleotide sequence reduces expression of the target mRNA in G-MDSCs and M-MDSCs. In some aspects, the T cell is a CD8+ T cell or Treg cell.

[0020] In some aspects, the oligonucleotide-ligand conjugate comprises a single stranded oligonucleotide. In some aspects, the oligonucleotide-ligand conjugate comprises a double stranded oligonucleotide. In some aspects, the double stranded oligonucleotide comprises a sense strand and an antisense strand that form a duplex region, wherein the antisense strand comprises a region of complementarity to the target mRNA in the immune cell associated with a tumor microenvironment.

[0021] In another aspect, the present disclosure provides RNAi oligonucleotide molecules capable of inhibiting expression of STAT3. Such molecules can be used alone or in combination with a second therapeutic agent and can vary in dosage. In some embodiments, such RNAi oligonucleotide molecules are comprised of a sense strand and an antisense strand forming a double-stranded region.

[0022] In some aspects, an oligonucleotide for reducing STAT3 expression comprises an antisense strand of 15 to 30 nucleotides in length and a sense strand of 15 to 40 nucleotides in length, wherein the sense strand and antisense strand form a duplex region, wherein the antisense strand has a region of complementarity to a target mRNA sequence of STAT3 as set forth in SEQ ID NO: 85 or SEQ ID NO: 1217, and wherein the region of complementarity is at least 15 contiguous nucleotides in length differing by no more than 3 nucleotides from the target sequence. In some aspects, the region of complementarity is fully complementary to the target sequence of STAT3.

[0023] In some aspects, an oligonucleotide for reducing STAT3 expression comprises a region of complementarity at least 15 contiguous nucleotides in length to a target sequence selected from SEQ ID NOs: 89-280. In some aspects, the region of complementarity is selected from SEQ ID Nos: 89-280.

[0024] In some aspects, an oligonucleotide for reducing STAT3 expression comprises:
[0025] (i) an antisense strand of 19-30 nucleotides in length, wherein the antisense strand comprises a nucleotide sequence comprising a region of complementarity to a STAT3 mRNA target sequence, wherein the region of complementarity is selected from SEQ ID NOs: 89-280, and
[0026] (ii) a sense strand of 19-50 nucleotides in length comprising a region of complementarity to the antisense strand, wherein the antisense and sense strands are separate strands which form an asymmetric duplex region having an overhang of 1-4 nucleotides at the 3′ terminus of the antisense strand.

[0027] In some aspects, the sense strand comprises at least 15 contiguous nucleotides differing by no more than 3 nucleotides from any one of the nucleotide sequences of SEQ ID NOs: 9, 37, 65, or 69, and the antisense strand comprises at least 15 contiguous nucleotides differing by no more than 3 nucleotides from the nucleotide sequences of SEQ ID NOs: 10, 38, 66, or 70. In some aspects, an oligonucleotide for reducing STAT3 expression comprises a sense strand and an antisense strand comprising the nucleotide sequences selected from:
[0028] (a) SEQ ID NOS: 9 and 10, respectively;
[0029] (b) SEQ ID NOs: 37 and 38, respectively;
[0030] (c) SEQ ID NOs: 65 and 66, respectively; and,
[0031] (d) SEQ ID NOs: 69 or 70, respectively.

[0032] In some aspects, an oligonucleotide for reducing STAT3 expression comprises a sense strand comprising a nucleotide sequence selected from SEQ ID NOs: 857-946.

[0033] In some aspects, an oligonucleotide for reducing STAT3 expression comprises an antisense strand comprising a nucleotide sequence selected from SEQ ID NOs: 947-1036.

[0034] In some aspects, an oligonucleotide for reducing STAT3 expression comprises a sense strand and an antisense strand comprising the nucleotide sequences selected from:
[0035] (a) SEQ ID NOs: 861 and 951, respectively;
[0036] (b) SEQ ID NOs: 857 and 947, respectively;
[0037] (c) SEQ ID NOs: 858 and 948, respectively;
[0038] (d) SEQ ID NOs: 859 and 949, respectively;
[0039] (e) SEQ ID NOs: 860 and 950, respectively;
[0040] (f) SEQ ID NOs: 862 and 952, respectively;
[0041] (g) SEQ ID NOs: 863 and 953, respectively;
[0042] (h) SEQ ID NOs: 864 and 954, respectively;
[0043] (i) SEQ ID NOs: 865 and 955, respectively;
[0044] (j) SEQ ID NOs: 866 and 956, respectively;
[0045] (k) SEQ ID NOs: 867 and 957, respectively;
[0046] (l) SEQ ID NOs: 868 and 958, respectively;
[0047] (m) SEQ ID NOs: 869 and 959, respectively;
[0048] (n) SEQ ID NOs: 870 and 960, respectively;
[0049] (o) SEQ ID NOs: 871 and 961, respectively;
[0050] (p) SEQ ID NOs: 872 and 962, respectively;
[0051] (q) SEQ ID NOs: 873 and 963, respectively;
[0052] (r) SEQ ID NOs: 874 and 964, respectively;
[0053] (s) SEQ ID NOs: 875 and 965, respectively;
[0054] (t) SEQ ID NOs: 876 and 966, respectively;
[0055] (u) SEQ ID NOs: 877 and 967, respectively;
[0056] (v) SEQ ID NOs: 878 and 968, respectively;
[0057] (w) SEQ ID NOs: 879 and 969, respectively;
[0058] (x) SEQ ID NOs: 880 and 970, respectively;
[0059] (y) SEQ ID NOs: 881 and 971, respectively;
[0060] (z) SEQ ID NOs: 882 and 972, respectively;
[0061] (aa) SEQ ID NOs: 883 and 973, respectively;
[0062] (bb) SEQ ID NOs: 884 and 974, respectively;
[0063] (cc) SEQ ID NOs: 885 and 975, respectively;
[0064] (dd) SEQ ID NOs: 886 and 976, respectively;
[0065] (ee) SEQ ID NOs: 887 and 977, respectively;
[0066] (ff) SEQ ID NOs: 888 and 978, respectively;
[0067] (gg) SEQ ID NOs: 940 and 1030, respectively;
[0068] (hh) SEQ ID NOs: 896 and 986, respectively; and
[0069] (ii) SEQ ID NOs: 920 and 1010, respectively.

[0070] In some aspects, an oligonucleotide for reducing STAT3 expression comprises a sense strand and an antisense strand comprising the nucleotide sequences selected from:
[0071] (a) SEQ ID NOs: 901 and 991, respectively;
[0072] (b) SEQ ID NOs: 910 and 1000, respectively;
[0073] (c) SEQ ID NOs: 899 and 989, respectively;
[0074] (d) SEQ ID NOs: 896 and 986, respectively;
[0075] (e) SEQ ID NOs: 892 and 982, respectively;
[0076] (f) SEQ ID NOs: 890 and 980, respectively; and
[0077] (g) SEQ ID NOs: 889 and 979, respectively.

[0078] In some aspects, an oligonucleotide for reducing STAT3 expression comprises a sense strand and an antisense strand comprising the nucleotide sequences selected from:
[0079] (a) SEQ ID NOs: 940 and 1030, respectively;
[0080] (b) SEQ ID NOs: 937 and 1027, respectively; and
[0081] (c) SEQ ID NOs: 939 and 1029, respectively.

[0082] In some aspects, an oligonucleotide for reducing STAT3 expression comprises a sense strand and an antisense strand comprising the nucleotide sequences selected from:
[0083] (a) SEQ ID NOs: 915 and 1005, respectively;
[0084] (b) SEQ ID NOs: 924 and 1014, respectively;
[0085] (c) SEQ ID NOs: 913 and 1003, respectively; and
[0086] (d) SEQ ID NOs: 920 and 1010, respectively.

[0087] In some aspects, an oligonucleotide for reducing STAT3 expression comprises a sense strand comprising the nucleotide sequence of SEQ ID NO: 862 and an antisense strand comprising the nucleotide sequence of SEQ ID NO: 952.

[0088] In some aspects, an oligonucleotide for reducing STAT3 expression comprises a sense strand comprising the nucleotide sequence of SEQ ID NO: 875 and an antisense strand comprising the nucleotide sequence of SEQ ID NO: 965.

[0089] In some aspects, an oligonucleotide for reducing STAT3 expression comprises a sense strand comprising the nucleotide sequence of SEQ ID NO: 876 and an antisense strand comprising the nucleotide sequence of SEQ ID NO: 966.

[0090] In some aspects, an oligonucleotide for reducing STAT3 expression comprises a sense strand comprising the nucleotide sequence of SEQ ID NO: 920 and an antisense strand comprising the nucleotide sequence of SEQ ID NO: 966.

[0091] In any of the foregoing or related aspects, the antisense strand is 19 to 27 nucleotides in length or 21 to 27 nucleotides in length. In some embodiments, the antisense strand is 22 nucleotides in length.

[0092] In any of the foregoing or related aspects, the sense strand is 19 to 40 nucleotides in length. In some embodiments, the sense strand is 36 nucleotides in length.

[0093] In any of the foregoing or related aspects, the oligonucleotide has a duplex region of at least 19 nucleotides in length. In any of the foregoing or related aspects, the oligonucleotide has a duplex region of at least 21 nucleotides in length. In some embodiments, the duplex region is 20 nucleotides in length.

[0094] In some embodiments, the region of complementarity to STAT3 is at least 19 contiguous nucleotides in length. In some embodiments, the region of complementarity to STAT3 is at least 21 contiguous nucleotides in length.

[0095] In any of the foregoing or related aspects, the oligonucleotide comprises on the sense strand at its 3′ end a stem-loop set forth as: S1-Loop-S2, wherein S1 is complementary to S2, and wherein Loop forms a loop between S1 and S2 of 3 to 5 nucleotides in length.

[0096] In some embodiments, an oligonucleotide for reducing STAT3 expression for treating or preventing cancer, and/or preventing metastasis of cancer, comprises an antisense strand and a sense strand, wherein the antisense strand is 21 to 27 nucleotides in length and has a region of complementarity to a target mRNA sequence of STAT3 set forth in SEQ ID NO: 85 or SEQ ID NO: 1217, wherein the sense strand comprises at its 3′ end a stem-loop set forth as: S1-Loop-S2, wherein S1 is complementary to S2, and wherein Loop forms a loop between S1 and S2 of 3 to 5 nucleotides in length, and wherein the antisense strand and the sense strand form a duplex structure of at least 19 nucleotides in length.

[0097] In some embodiments, Loop is a tetraloop. In some embodiments, Loop is 4 nucleotides in length. In some embodiments, Loop comprises a sequence GAAA.

[0098] In some embodiments, the oligonucleotide comprises an antisense strand which is 27 nucleotides in length and a sense strand which is 25 nucleotides in length. In some embodiments, the oligonucleotide comprises an antisense strand which is 22 nucleotides in length and a sense strand which is 36 nucleotides in length.

[0099] In any of the foregoing or related aspects, the duplex region of the oligonucleotide of the present disclosure comprises a 3′-overhang sequence on the antisense strand. In some embodiments, the 3′-overhang sequence on the antisense strand is 2 nucleotides in length. In some embodiments, the 3′-overhang sequence is GG.

[0100] In some embodiments, the oligonucleotide comprises an antisense strand and a sense strand that are each in a range of 21 to 23 nucleotides in length. In some embodiments, the oligonucleotide comprises a duplex structure in a range of 19 to 21 nucleotides in length. In some such embodiments, the oligonucleotide comprises a 3′-overhang sequence of one or more nucleotides in length, wherein the 3′-overhang sequence is present on the antisense strand, the sense strand, or the antisense strand and sense strand. In some embodiments, the 3′-overhang sequence of 2 nucleotides in length, wherein the 3′-overhang sequence is on the antisense strand, and wherein the sense strand is 21 nucleotides in length and the antisense strand is 23 nucleotides in length, such that the sense strand and antisense strand form a duplex of 21 nucleotides in length.

[0101] In some embodiments, the oligonucleotide comprises at least one modified nucleotide. In some embodiments, the modified nucleotide comprises a 2′-modification. In some embodiments, all the nucleotides of the oligonucleotide are modified, for example with a 2′-modification. In some embodiments, about 10-15%, 10%, 11%, 12%, 13%, 14% or 15% of the nucleotides of the sense strand comprise a 2′-fluoro modification. In some embodiments, about 25-35%, 25%, 26%, 27%, 28%, 29%, 30%, 31%, 32%, 33%, 34% or 35% of the nucleotides of the antisense strand comprise a 2′-fluoro modification. In some embodiments, about 25-35%, 25%, 26%, 27%, 28%, 29%, 30%, 31%, 32%, 33%, 34% or 35% of the nucleotides of the oligonucleotide comprise a 2′-fluoro modification. In some embodiments, the sense strand comprises 36 nucleotides with positions 1-36 from 5′ to 3′, wherein positions 8-11 comprise a 2′-fluoro modification. In some embodiments, the antisense strand comprises 22 nucleotides with positions 1-22 from 5′ to 3′, and wherein positions 2, 3, 4, 5, 7, 10 and 14 comprise a 2′-fluoro modification. In some embodiments, the remaining nucleotides comprise a 2′-O-methyl modification.

[0102] In some embodiments, the oligonucleotide comprises at least one modified internucleotide linkage, preferably a phosphorothioate linkage.

[0103] In some embodiments, the 4′-carbon of the sugar of the 5′-nucleotide of the antisense strand comprises a phosphate analog, for example, an oxymethylphosphonate, vinylphosphonate or malonyl phosphonate.

[0104] In some embodiments, at least one nucleotide of the oligonucleotide is conjugated to one or more targeting ligands, such as a carbohydrate, amino sugar, cholesterol, polypeptide, or lipid.

[0105] In some embodiments the targeting ligand is a saturated fatty acid moiety. In some embodiments the saturated fatty acid moiety varies in length from C10 to C24. In some embodiments the saturated fatty acid moiety has a length of C16. In some embodiments the saturated fatty acid moiety has a length of C18. In some embodiments the saturated fatty acid moiety has a length of C22.

[0106] In some embodiments, the targeting ligand comprises a N-acetyl galactosamine (GalNAc) moiety. In some embodiments, the (GalNAc) moiety comprises a monovalent GalNAc moiety, a bivalent GalNAc moiety, a trivalent GalNAc moiety, or a tetravalent GalNAc moiety.

[0107] In some aspects, an oligonucleotide for reducing STAT3 expression comprises a sense strand and an antisense strand comprising the nucleotide sequences selected from:
[0108] (a) SEQ ID NOs: 1041 and 1131, respectively;
[0109] (b) SEQ ID NOs: 1037 and 1127, respectively;
[0110] (c) SEQ ID NOs: 1038 and 1128, respectively;
[0111] (d) SEQ ID NOs: 1039 and 1129, respectively;
[0112] (e) SEQ ID NOs: 1040 and 1130, respectively;
[0113] (f) SEQ ID NOs: 1042 and 1132, respectively;
[0114] (g) SEQ ID NOs: 1043 and 1133, respectively;
[0115] (h) SEQ ID NOs: 1044 and 1134, respectively;
[0116] (i) SEQ ID NOs: 1045 and 1135, respectively;
[0117] (j) SEQ ID NOs: 1046 and 1136, respectively;
[0118] (k) SEQ ID NOs: 1047 and 1137, respectively;
[0119] (l) SEQ ID NOs: 1048 and 1138, respectively;
[0120] (m) SEQ ID NOs: 1049 and 1139, respectively;
[0121] (n) SEQ ID NOs: 1050 and 1140, respectively;
[0122] (o) SEQ ID NOs: 1051 and 1141, respectively;
[0123] (p) SEQ ID NOs: 1052 and 1142, respectively;
[0124] (q) SEQ ID NOs: 1053 and 1143, respectively;
[0125] (r) SEQ ID NOs: 1054 and 1144, respectively;
[0126] (s) SEQ ID NOs: 1055 and 1145, respectively;
[0127] (t) SEQ ID NOs: 1056 and 1146, respectively;
[0128] (u) SEQ ID NOs: 1057 and 1147, respectively;
[0129] (v) SEQ ID NOs: 1058 and 1148, respectively;
[0130] (w) SEQ ID NOs: 1059 and 1149, respectively;
[0131] (x) SEQ ID NOs: 1060 and 1150, respectively;
[0132] (y) SEQ ID NOs: 1061 and 1151, respectively;
[0133] (z) SEQ ID NOs: 1062 and 1152, respectively;
[0134] (aa) SEQ ID NOs: 1063 and 1153, respectively;
[0135] (bb) SEQ ID NOs: 1064 and 1154, respectively;
[0136] (cc) SEQ ID NOs: 1065 and 1155, respectively;
[0137] (dd) SEQ ID NOs: 1066 and 1156, respectively;
[0138] (ee) SEQ ID NOs: 1067 and 1157, respectively;
[0139] (ff) SEQ ID NOs: 1068 and 1158, respectively;
[0140] (gg) SEQ ID NOs: 1120 and 1210, respectively;
[0141] (hh) SEQ ID NOs: 1076 and 1166, respectively; and
[0142] (ii) SEQ ID NOs: 1100 and 1190, respectively.

[0143] In some aspects, an oligonucleotide for reducing STAT3 expression comprises a sense strand and an antisense strand comprising the nucleotide sequences selected from:
[0144] (a) SEQ ID NOs: 1081 and 1171, respectively;
[0145] (b) SEQ ID NOs: 1090 and 1180, respectively;
[0146] (c) SEQ ID NOs: 1079 and 1169, respectively;
[0147] (d) SEQ ID NOs: 1076 and 1166, respectively;
[0148] (e) SEQ ID NOs: 1072 and 1162, respectively;
[0149] (f) SEQ ID NOs: 1070 and 1160, respectively; and
[0150] (g) SEQ ID NOs: 1069 and 1159, respectively.

[0151] In some aspects, an oligonucleotide for reducing STAT3 expression comprises a sense strand and an antisense strand comprising the nucleotide sequences selected from:
[0152] (a) SEQ ID NOs: 1120 and 1210, respectively;
[0153] (b) SEQ ID NOs: 1117 and 1207, respectively; and
[0154] (c) SEQ ID NOs: 1119 and 1209, respectively.

[0155] In some aspects, an oligonucleotide for reducing STAT3 expression comprises a sense strand and an antisense strand comprising the nucleotide sequences selected from:
[0156] (a) SEQ ID NOs: 1095 and 1185, respectively;
[0157] (b) SEQ ID NOs: 1104 and 1194, respectively;
[0158] (c) SEQ ID NOs: 1093 and 1183, respectively; and
[0159] (d) SEQ ID NOs: 1100 and 1190, respectively.

[0160] In some aspects, an oligonucleotide for reducing STAT3 expression comprises a sense strand comprising the nucleotide sequence of SEQ ID NO: 1042 and an antisense strand comprising the nucleotide sequence of SEQ ID NO: 1132.

[0161] In some aspects, an oligonucleotide for reducing STAT3 expression comprises a sense strand comprising the nucleotide sequence of SEQ ID NO: 1055 and an antisense strand comprising the nucleotide sequence of SEQ ID NO: 1145.

[0162] In some aspects, an oligonucleotide for reducing STAT3 expression comprises a sense strand comprising the nucleotide sequence of SEQ ID NO: 1056 and an antisense strand comprising the nucleotide sequence of SEQ ID NO: 1146.

[0163] In some aspects, an oligonucleotide for reducing STAT3 expression comprises a sense strand comprising the nucleotide sequence of SEQ ID NO: 1100 and an antisense strand comprising the nucleotide sequence of SEQ ID NO: 1190.

[0164] In some embodiments, the targeting ligand is conjugated to one or more nucleotides of Loop of the stem loop. In some embodiments, up to 4 nucleotides of Loop of the stem-loop are each conjugated to a monovalent GalNAc moiety.

[0165] In some embodiments, the oligonucleotides of the present disclosure are RNAi oligonucleotides.

[0166] In some embodiments, the disclosure of the present disclosure is a pharmaceutical composition comprising one or more oligonucleotides and a pharmaceutically acceptable carrier, delivery agent or excipient.

[0167] In some aspects the oligonucleotide of the present disclosure is provided in the form of a kit for treating a cancer. In a further aspect, the oligonucleotide of the present disclosure is provided in the form of a kit for treating a disease, disorder or condition associated with STAT3 expression. In some embodiments, the kit comprises an oligonucleotide described herein, and a pharmaceutically acceptable carrier. In some embodiments, the kit further includes a package insert comprising instructions for administration of the oligonucleotide to a subject having a cancer. In some embodiments, the kit further includes a package insert comprising instructions for administration of the oligonucleotide to a subject having a disease, disorder or condition associated with STAT3 expression.

[0168] In some embodiments, the present disclosure provides a method of delivering an oligonucleotide to a subject, the method comprising administering a pharmaceutical composition to a subject. In some embodiments, the present disclosure provides a method of delivering an oligonucleotide to an immune cell associated with a tumor microenvironment, comprising administering an oligonucleotide-ligand conjugate described herein.

[0169] In some embodiments the oligonucleotide-ligand conjugate is delivered to tumor associated cells. In some embodiments the oligonucleotide-ligand conjugate is delivered to immune cells. In some embodiments the immune cells are myeloid derived suppressor cells (MDSCs). In some embodiments, the immune cells are T cells.

[0170] In some embodiments the oligonucleotide described herein targets STAT3. In some embodiments the oligonucleotide targets STAT3 and the siRNA also modulates PD-LI mRNA expression.

[0171] In some aspects, the present disclosure provides a method of reducing expression of a target mRNA in a cell, a population of cells associated with a tumor microenvironment in a subject by administering an oligonucleotide of the disclosure. In another aspect, the present disclosure provides a method of reducing STAT3 expression in a cell, a population of cells or a subject by administering an oligonucleotide of the disclosure. In some embodiments, a method of reducing STAT3 expression in a cell, a population of cells or a subject comprises the step of: contacting the cell or the population of cells or administering to the subject an effective amount of an oligonucleotide or oligonucleotides described herein, or a pharmaceutical composition thereof. In some embodiments, the method for reducing STAT3 expression comprises reducing an amount or a level of STAT3 and PD-L1 mRNA, an amount, or a level of STAT3 and PD-L1 protein, or both.

[0172] In some embodiments the present disclosure provides a pharmaceutical product for use as a therapeutic agent. In some embodiments a therapeutic agent is administered as a monotherapy and is an inhibitor of STAT3 expression.

[0173] In some embodiments, a method of treating human subjects that are resistant to anti-PD1 or anti-PD-L1 therapy is provided comprising administering any one of the STAT3 targeting oligonucleotides described herein. Subjects who are resistant to anti-PD1 or anti-PD-L1 include subject whose benefit from the anti-PD1 or anti-PD-L1 therapy remained diminished by at least one standard deviation as compared to a non-resistant control for greater than three months.

[0174] In some embodiments a therapeutic agent is administered as a monotherapy and is an inhibitor of STAT3 and PD-L1 expression. In some embodiments, the present disclosure provides a pharmaceutical product comprising at least a first and second therapeutic agent, wherein the first therapeutic agent is an inhibitor of STAT3. In some embodiments a therapeutic agent is administered prior to, or intermittently with, administration of a second therapeutic agent. In some embodiments, a first therapeutic agent is administered concurrently or simultaneously with a second therapeutic agent. In some embodiments, the present disclosure provides a pharmaceutical product comprising more than two therapeutic agents, wherein the first therapeutic agent is an inhibitor of STAT3.

[0175] In some aspects, the disclosure provides a method of treating cancer in a subject, the method comprising administering to the subject an effective amount of an oligonucleotide-ligand conjugate described herein that targets a regulator of immune suppression, provided by the disclosure, in combination with one or more additional therapeutic agents or procedures. In some embodiments, the disclosure provides a method of treating cancer in a subject, the method comprising administering to the subject an effective amount of an oligonucleotide that targets STAT3, provided by the disclosure, in combination with one or more additional therapeutic agents or procedures. In some aspects, the second therapeutic agent or procedure is selected from the group consisting of: a chemotherapy, a targeted anti-cancer therapy, an oncolytic drug, a cytotoxic agent, an immune-based therapy, a cytokine, surgical procedure, a radiation procedure, an activator of a costimulatory molecule, an inhibitor of an inhibitory molecule, a vaccine, or a cellular immunotherapy, gene therapy or a combination thereof.

[0176] In some embodiments, the disclosure provides a method of treating a subject having a disease, disorder or condition associated with STAT3 expression, the method comprising administering to the subject a therapeutically effective amount of an oligonucleotide or oligonucleotide-ligand conjugate described herein. In some embodiments, the oligonucleotide or oligonucleotide-ligand conjugate is administered in combination with a second composition or therapeutic agent. In some embodiments, the second composition or therapeutic agent targets TGFB, CXCR2, CCR2, ARG1, PTGS2, SOCS1 or PD-L1.

[0177] In some embodiments, the one or more additional therapeutic agents is a PD-1 antagonist, a CTLA-4 inhibitor, a TGFB inhibitor, a CXCR2 inhibitor, a CCR2 antagonist, an ARG1 inhibitor, a PTGS2 inhibitor, a SOCS1 modulator or a combination thereof.

[0178] In some embodiments, the one or more additional therapeutic agents is a PD-1 antagonist.

[0179] In some embodiments, the PD-1 antagonist is selected from the group consisting of: PDR001, nivolumab, pembrolizumab, pidilizumab, MEDI0680, REGN2810, TSR-042, PF-06801591, and AMP-224. In some embodiments, the PD-1 antagonist is selected from the group consisting of: FAZ053, Atezolizumab, Avelumab, Durvalumab, and BMS-936559.

[0180] In some embodiments, the one or more additional therapeutic agents is a CTLA-4 inhibitor. In some embodiments, the CTLA-4 inhibitor is Ipilimumab or Tremelimumab.

[0181] In some embodiments, the one or more additional therapeutic agents is a TGFB inhibitor. In some embodiments, the TGFB inhibitor is Frisolimumab, LY3022859 or PF-03446962.

[0182] In some embodiments, the one or more additional therapeutic agents is an ARG1 inhibitor. In some embodiments, the ARG1 inhibitor is CB-1158.

### BRIEF DESCRIPTION OF THE DRAWINGS

[0183] FIG. 1A provides structures of RNAi oligonucleotide molecules having chemical modifications with GalNAc (top) or lipid (bottom) conjugated to the base molecule to generate oligonucleotide-ligand conjugates.

[0184] FIG. 1B provides structures of lipid tails suitable for conjugation to RNAi oligonucleotide molecules.

[0185] FIG. 2A is a graph representing remaining human ALDH2 mRNA levels in human LS411N tumor xenograft epithelium from mice three days following treatment with 10 mg/kg ALDH2 RNAi-GalXC lipid conjugates with varying acyl chain lengths and unsaturation.

[0186] FIG. 2B is a graph representing remaining mouse Aldh2 mRNA levels in tumor microenvironment (TME) isolated from human LS411N tumor xenografts. TME was isolated from mice three days following treatment with 10 mg/kg ALDH2-GalXC lipid conjugates with varying acyl chain lengths and unsaturation

[0187] FIG. 3A is a graph demonstrating remaining human ALDH2 mRNA following treatment with various doses of GalXC-ALDH2-C22 conjugate in human LS411N tumor xenograft epithelium. Samples were collected from mice on Days 3, 7, and 14 post-treatment.

[0188] FIG. 3B is a graph demonstrating remaining mouse Aldh2 mRNA following treatment with various doses of GalXC-ALDH2-C22 conjugate in host mouse tissue in the tumor microenvironment collected from human LS411N tumors. Samples were collected on Days 3, 7, and 14 post-treatment.

[0189] FIGS. 4A and 4B are graphs demonstrating remaining mouse Aldh2 mRNA following treatment with 25 mg/kg of GalXC-ALDH2-C22 conjugate in the tumor draining lymph nodes of human LS411N tumor xenograft bearing mice (FIG. 4A) and in lymph nodes of mice with no tumors (FIG. 4B).

[0190] FIG. 5A is a graph showing remaining mouse Aldh2 mRNA levels following treatment with GalXC-ALDH2-C22 conjugate or PBS in murine tumor draining lymph nodes (TdLN) compared to non-TdLN over time in human LS411N tumor xenografts. Normalized mRNA is relative to a PBS treated mouse.

[0191] FIG. 5B provides graphs showing the Pdl1 mRNA levels in murine tumor draining lymph nodes (TdLN) compared to Non-TdLN from LS411N tumor xenograft mice treated with GalXC-ALDH2-C22.

[0192] FIG. 6 is a graph demonstrating the expression of Arg1 in isolated tumor associated CD11b⁺ myeloid derived suppressor cells (MDSCs) and normal spleen myeloid cells from human LS411N tumor xenografts treated with 25 mg/kg GalXC-ALDH2-C22. Three days after treatment, MDSCs and tumor cells were isolated from mice and measured using CD11b mRNA. BLOQ=below limit of quantification.

[0193] FIGS. 7A and 7B are graphs showing the level of remaining mouse Aldh2 mRNA in isolated CD11b+ MDSCs (FIG. 7A) and tumor cells (FIG. 7B) from mice with human LS411N tumor xenografts treated with GalXC-ALDH2-C22 conjugate.

[0194] FIGS. 8A and 8B are graphs demonstrating remaining mouse Aldh2 mRNA from bulk tumor (FIG. 8A), and liver (FIG. 8B) of Pan02 xenografts. Mice were treated with 25 mg/kg of the specified GalXC-ALDH2-lipid conjugate and mRNA was measured on day 3.

[0195] FIGS. 8C and 8D are graphs demonstrating remaining mouse Aldh2 mRNA from bulk tumor (FIG. 8C) and tumor draining lymph node (TdLN) from mice with Pan02 xenografts on day 7 and day 14 after treatment with 25 mg/kg of the specified GalXC-ALDH2-lipid conjugate.

[0196] FIG. 9 provides graphs showing expression of differentiating mRNA markers (Ly6G, Cxcr2, Slc27a2, and Ptgs2) in G-MDSC isolated from TME of untreated (control) PANO2 tumors.

[0197] FIG. 10 provides graphs showing the expression of differentiating mRNA markers (Ly6G, Cxcr2, Slc27a2, and Ptgs2) in M-MDSC isolated from TME.

[0198] FIGS. 11 and 12 provide graphs showing the differential expression of lipid trafficking receptors in G-MDSC and M-MDSC in untreated (control) tissue.

[0199] FIGS. 13A and 13B provide graphs showing remaining mouse Aldh2 mRNA levels after treatment with 25 mg/kg of GalXC-ALDH2-C18 conjugate in isolated G-MDSCs and M-MDSCs from Pan02 (FIG. 13A) and B16F10 (FIG. 13B) TME. Mice were randomized into groups once tumors reached 300-500 mm then treated on day 1 and tissue was collected for analysis on day 3.

[0200] FIGS. 13C and 13D provide graphs showing remaining mouse Aldh2 mRNA levels after treatment with 50 mg/kg GalXC-ALDH2-C18 conjugate in G-MDSCs and M-MDSCs from Pan02 TME of mice on days 3 (FIG. 13C) and 7 (FIG. 13D).

[0201] FIGS. 14A-14C are graphs showing the relative expression of Stat3 in G-MDSC (FIG. 14A), M-MDSC (FIG. 14B) and TdLN (FIG. 14C) from Pan02 xenografts implanted in mice.

[0202] FIGS. 15A and 15B are graphs showing remaining mouse Stat3 mRNA levels in the livers of mice treated with GalXC-STAT3-conjugates (GalNAc conjugates) targeting different regions of Stat3 mRNA. Mice were administered a single dose (3 mg/kg) (FIG. 15A) and multi dose to determine dose responsiveness (FIG. 15B). Arrows indicate constructs selected for further study.

[0203] FIGS. 16A and 16B are graphs showing mouse Stat3 mRNA expression after treatment with GalXC-STAT3-C18 conjugates in G-MDSCs and M-MDSCs derived from Pan02 xenografts implanted in mice. Tumors were dosed at 25 mg/kg (FIG. 16A) and 50 mg/kg (FIG. 16B).

[0204] FIGS. 17A and 17B are graphs showing mouse Stat3 mRNA expression after treatment of Pan02 xenograft mice with GalXC-STAT3-C18 conjugates in bulk tumor (TME) (FIG. 17A) and TdLNs (FIG. 17B) at doses of 25 and 50 mg/kg.

[0205] FIG. 18A provides graphs showing the effect of GalXC-STAT3-C18-4123 on Stat3 and Pdl1 mRNA levels in G/M-MDSCs in TME and TdLNs of Pan02 xenograft mice on day 3 after a dose of 25 or 50 mg/kg of conjugate.

[0206] FIG. 18B provides graphs showing the effect of GalXC-STAT3-C18-4123 on Stat3 and Pdl1 mRNA levels in TdLN of Pan02 xenograft mice on day 7 after a 25 mg/kg dose of conjugate.

[0207] FIGS. 19A and 19B are graphs showing the in vivo effect of subcutaneous treatment with a total dose of 50 mg/kg GalXC-STAT3-C18-4123 on tumor volume in immunocompetent mice bearing Pan02 murine pancreatic tumors. Mice were treated with either four 12.5 mg/kg (FIG. 19A) or two 25 mg/kg (FIG. 19B) doses of conjugate.

[0208] FIG. 20 provides a graph depicting the percent (%) of human STAT3 mRNA remaining in Huh7 cells endogenously expressing human STAT3, after 24-hour treatment with 1 nM of DsiRNA targeting various regions of the STAT3 gene. 192 DsiRNAs were designed and screened. Two primer pairs were used. Expression was normalized between samples using the HPRT and SFRS9 housekeeping genes (Forward 1—SEQ ID NO: 1219, Reverse 1—SEQ ID NO: 1220; Probe 1—SEQ ID NO: 1221; Forward 2—SEQ ID NO: 1222, Reverse 2—SEQ ID NO: 1223; Probe 2—SEQ ID NO: 1224).

[0209] FIGS. 21A and 21B provide graphs depicting the percent (%) of human STAT3 mRNA remaining in Huh7 cells endogenously expressing human STAT3, after 24-hour treatment with 0.05 nM, 0.3 nM, or 1 nM of DsiRNA targeting various regions of the STAT3 gene. 48 GalNAc-conjugated STAT3 oligonucleotides s were assayed in FIG. 21A and 34 of those oligonucleotides were selected for further testing in vivo (FIG. 21B).

[0210] FIGS. 22A and 22B provide graphs depicting the percent (%) of human STAT3 mRNA remaining in liver of mice exogenously expressing human STAT3 (hydrodynamic injection model) after treatment with GalNAc-conjugated STAT3 oligonucleotides. Mice were dosed subcutaneously with 1 mg/kg of the indicated GalNAc-STAT3 oligonucleotides formulated in PBS. Three days post-dose mice were hydrodynamically injected (HDI) with a DNA plasmid encoding human STAT3. The level of human STAT3 mRNA was determined from livers collected 18 hours after injection. Arrows indicate oligonucleotides selected for dose response analysis. Hs/Mf=human/monkey common sequence; Hs/Mm=human/mouse common sequence; Hs/Mf/Mm=human/monkey/mouse triple common sequence.

[0211] FIG. 23 provides a graph depicting the dose response of GalNAc-conjugated STAT3 oligonucleotides. The percent (%) of human STAT3 mRNA remaining in liver of mice exogenously expressing STAT3 (HDI model) after treatment with human GalNAc-conjugated STAT3 oligonucleotides at three doses (0.3 mg/kg, 1 mg/kg) was measured. The level of human STAT3 mRNA was determined from livers collected 18 hours after injection with plasmid encoding human STAT3. Arrows indicate oligonucleotides selected for dose response analysis. Hs/Mf=human/monkey common sequence; Hs/Mm=human/mouse common sequence.

[0212] FIG. 24 provides a graph depicting the normalized (to Ppib) relative mouse STAT3 mRNA remaining in liver of mice endogenously expressing mouse STAT3 after treatment with GalNAc-conjugated STAT3 oligonucleotides. Mice were dosed subcutaneously with 3 mg/kg of the indicated GalNAc-STAT3 oligonucleotides formulated in PBS. Five days post-dose liver was collected and the level of mouse STAT3 mRNA was determined. Arrows indicate top oligonucleotides and those selected for dose response study.

[0213] FIG. 25 provides a graph depicting the normalized (to Ppib) relative mouse STAT3 mRNA remaining in liver of mice endogenously expressing mouse STAT3 after treatment with GalNAc-conjugated STAT3 oligonucleotides. Mice were dosed subcutaneously with 3 mg/kg of the indicated GalNAc-STAT3 oligonucleotides formulated in PBS. Five days post-dose liver was collected and the level of mouse STAT3 mRNA was determined. Arrows indicate oligonucleotides selected for dose response study.

[0214] FIGS. 26A and 26B provide graphs depicting the dose response of GalNAc-conjugated STAT3 oligonucleotides. The percent (%) of mouse STAT3 mRNA remaining in liver of mice endogenously expressing STAT3 after treatment with human GalNAc-conjugated STAT3 oligonucleotides at three doses (0.3 mg/kg, 1 mg/kg, and 3 mg/kg) was measured. The level of mouse STAT3 mRNA was determined from livers collected 5 days later. TC=triple common (mouse/human/monkey); Hs_Mm=human/mouse.

[0215] FIG. 27 provides a graph depicting the percent (%) of human STAT3 mRNA remaining in liver of mice exogenously expressing human STAT3 (hydrodynamic injection model) after treatment with GalNAc-conjugated STAT3 oligonucleotides. Mice were dosed subcutaneously with 1 mg/kg of the indicated GalNAc-STAT3 oligonucleotides formulated in PBS. Three days post-dose mice were hydrodynamically injected (HDI) with a DNA plasmid encoding human STAT3. The level of human STAT3 mRNA was determined from livers collected 18 hours after injection. Arrows indicate oligonucleotides selected for dose response study.

[0216] FIG. 28 provides a graph depicting the dose response of GalNAc-conjugated STAT3 oligonucleotides. The percent (%) of human STAT3 mRNA remaining in liver of mice exogenously expressing human STAT3 (hydrodynamic injection model) after treatment with GalNAc-conjugated STAT3 oligonucleotides. Mice were dosed subcutaneously with three doses (0.3 mg/kg, 1 mg/kg, and 3 mg/kg) of the indicated GalNAc-STAT3 oligonucleotides formulated in PBS. Three days post-dose mice were hydrodynamically injected (HDI) with a DNA plasmid encoding human STAT3. The level of human STAT3 mRNA was determined from livers collected 18 hours after injection. TC=triple common (mouse/human/monkey); Hs_Mm=human/mouse; Hs=human.

[0217] FIG. 29 provides a graph depicting the dose response of GalNAc-conjugated STAT3 oligonucleotides. The percent (%) of human STAT3 mRNA remaining in liver of mice exogenously expressing human STAT3 (hydrodynamic injection model) after treatment with GalNAc-conjugated STAT3 oligonucleotides. Mice were dosed subcutaneously with two doses (0.3 mg/kg and 1 mg/kg) of the indicated GalNAc-STAT3 oligonucleotides formulated in PBS. Three days post-dose mice were hydrodynamically injected (HDI) with a DNA plasmid encoding human STAT3. The level of human STAT3 mRNA was determined from livers collected 18 hours after injection.

[0218] FIG. 30 provides a graph depicting the percent (%) remaining human STAT1 mRNA in Huh7 cells endogenously expressing STAT3 and STAT1 treated with GalNAc-conjugated STAT3 oligonucleotides. Cells were treated for 24 hours with three doses (0.05 nM, 0.3 nM, and 1 nM) of oligonucleotide.

### DETAILED DESCRIPTION

[0219] The present disclosure now will be described more fully hereinafter with reference to the accompanying drawings, in which illustrative embodiments of the disclosure are shown. The disclosure may, however, be embodied in many different forms and should not be construed as limited to the embodiments set forth herein; rather, these embodiments are provided so that this disclosure will be thorough and complete, and will fully convey the scope of the disclosure to those skilled in the art.

[0220] In some aspects, the disclosure provides oligonucleotide-ligand conjugates (e.g., RNAi oligonucleotide-lipid conjugates) that reduce expression of a target gene (e.g., encoding a regulator of immune suppression) in immune cells within a tumor microenvironment. In other aspects, the disclosure provides methods of treating a disease or disorder (e.g., cancer) using the oligonucleotide-ligand conjugates, or pharmaceutically acceptable compositions thereof, described herein. In other aspects, the disclosure provides methods of using the oligonucleotide-ligand conjugates described herein in the manufacture of a medicament for treating cancer. In other aspects, the oligonucleotide-ligand conjugates provided herein are used to treat cancer by modulating (e.g., inhibiting or reducing) expression of a target gene encoding a regulator of immune suppression in an immune cell in the tumor microenvironment. In some aspects, the disclosure provides methods of treating cancer by reducing expression of a target encoding a regulator of immune suppression in an immune cell in the tumor microenvironment.

### Definitions

[0221] The publications discussed throughout the text are provided solely for their disclosure prior to the filing date of the present application. Nothing herein is to be construed as an admission that the inventors are not entitled to antedate such disclosure by virtue of prior disclosure.

[0222] As used herein, the term “and/or” includes any and all combinations of one or more of the associated listed items. Further, the singular forms and the articles “a”, “an” and “the” are intended to include the plural forms as well, unless expressly stated otherwise. It will be further understood that the terms: includes, comprises, including and/or comprising, when used in this specification, specify the presence of stated features, integers, steps, operations, elements, and/or components, but do not preclude the presence or addition of one or more other features, integers, steps, operations, elements, components, and/or groups thereof. Further, it will be understood that when an element, including component or subsystem, is referred to and/or shown as being connected or coupled to another element, it can be directly connected or coupled to the other element or intervening elements may be present.

[0223] Unless defined otherwise, all technical and scientific terms used herein have the same meaning as commonly understood to one of ordinary skill in the art to which this disclosure belongs. Although methods and materials similar or equivalent to those described herein can be used in the practice of the disclosed methods and compositions, exemplary methods, and materials are described herein.

[0224] General texts which describe molecular biological techniques useful herein, including the use of vectors, promoters and many other relevant topics, include Berger and Kimmel, GUIDE TO MOLECULAR CLONING TECHNIQUES, METHODS IN ENZYMOLOGY, volume 152, (Academic Press, Inc., San Diego, Calif.) (“Berger”); Sambrook et al., MOLECULAR CLONING—A LABORATORY MANUAL, 2d ed., Vol. 1-3, Cold Spring Harbor Laboratory, Cold Spring Harbor, 1989 (“Sambrook”) and CURRENT PROTOCOLS IN MOLECULAR BIOLOGY, F. M. Ausubel et al., eds., CURRENT PROTOCOLS, A JOINT VENTURE BETWEEN GREENE PUBLISHING ASSOCIATES, INC. AND JOHN WILEY AND SONS, INC., (supplemented through 1999) (“Ausubel”). Examples of protocols sufficient to direct persons of skill through in vitro amplification methods, including the polymerase chain reaction (PCR), the ligase chain reaction (LCR), Q.beta.-replicase amplification and other RNA polymerase mediated techniques (e.g., NASBA), e.g., for the production of the homologous nucleic acids of the disclosure are found in Berger, Sambrook, and Ausubel, as well as in Mullis et al., (1987) U.S. Pat. No. 4,683,202; Innis et al., eds. (1990); PCR PROTOCOLS: A GUIDE TO METHODS AND APPLICATIONS (Academic Press Inc. San Diego, Calif.) (“Innis”); Arnheim and Levinson (Oct. 1, 1990) Cand EN 36-47; J. NIH RES. (1991) 3:81-94; Kwoh et al., (1989) PROC. NATL. ACAD. SCI. USA 86: 1173; Guatelliet et al., (1990) PROC. NAT'L. ACAD. SCI. USA 87: 1874; Lomell et al., (1989) J. CLIN. CHEM 35: 1826; Landegren et al., (1988) SCIENCE 241: 1077-80; Van Brunt (1990) BIOTECHNOLOGY 8: 291-94; Wu and Wallace (1989) GENE 4:560; Barringer et al., (1990) GENE 89:117; and, Sooknanan and Malek (1995) BIOTECHNOLOGY 13: 563-564. Improved methods for cloning in vitro amplified nucleic acids are described in Wallace et al., U.S. Pat. No. 5,426,039. Improved methods for amplifying large nucleic acids by PCR are summarized in Cheng et al., (1994) NATURE 369: 684-85 and the references cited therein, in which PCR amplicons of up to 40 kb are generated.

[0225] As used in the specification and the appended claims, the singular forms “a,” “an” and “the” include plural referents unless the context clearly dictates otherwise. Thus, for example, reference to “a pharmaceutical carrier” includes mixtures of two or more such carriers, and the like.

[0226] Ranges can be expressed herein as from “about” one value, and/or to “about” another value. When such a range is expressed, another embodiment includes from the one value and/or to the other value. Similarly, when values are expressed as approximations, by use of the antecedent “about,” it will be understood that the value forms another embodiment. It will be further understood that the endpoints of each of the ranges are significant both in relation to the other endpoint, and independently of the other endpoint. It is also understood that there are several values disclosed herein, and that each value is also herein disclosed as “about” that value in addition to the value itself. For example, if the value “10” is disclosed, then “about 10” is also disclosed. It is also understood that when a value is disclosed that “less than or equal to” the value, “greater than or equal to the value” and possible ranges between values are also disclosed, as appropriately understood by the skilled artisan. For example, if the value “10” is disclosed the “less than or equal to 10” as well as “greater than or equal to 10” is also disclosed. It is also understood that the throughout the application, data is provided in several different formats, and that this data, represents endpoints and starting points, and ranges for any combination of the data points. For example, if a particular datapoint “10” and a particular data point 15 are disclosed, it is understood that greater than, greater than or equal to, less than, less than or equal to, and equal to 10 and 15 are considered disclosed as well as between 10 and 15. It is also understood that each unit between two particular units are also disclosed. For example, if 10 and 15 are disclosed, then 11, 12, 13, and 14 are also disclosed.

[0227] In this specification and in the claims, which follow, reference will be made to several terms which shall be defined to have the following meanings:

[0228] The term “cancer” or “tumor” includes, but is not limited to, solid tumors and blood borne tumors. These terms include diseases of the skin, tissues, organs, bone, cartilage, blood, and vessels. These terms further encompass primary and metastatic cancers.

[0229] The term “PD-1” refers to a protein found on T cells that helps keep the immune responses in check. When PD-1 is bound to another protein called PD-L1, it helps keep T cells from killing other cells, including cancer cells. Some anticancer drugs, called immune checkpoint inhibitors, are used to block PD-1. When this protein is prevented from acting on T cells, they can act to kill cancer cells.

[0230] The term “STAT3” refers to Signal transducer and activator of transcription 3 (STAT3) which is a transcription factor which in humans is encoded by the STAT3 gene (STAT3 Human (Hs) NM_001369512.1 Genbank RefSeq #, or NM_139276.3). STAT3 mediates the expression of a variety of genes in response to cell stimuli, and thus plays a key role in many cellular processes such as cell growth and apoptosis, as well as the growth and progression of cancer.

[0231] The term “TGF-β” refers to Transforming growth factor beta (TGF-β) which is a cytokine involved in immune and stem cell regulation and differentiation. TGF-β is an important cytokine with identified roles in many pathologies including cancer, infectious disease, and autoimmunity. Its immunosuppressive functions in the tumor microenvironment contribute to oncogenesis (Massague et al., CELL., 103 (2): 295-309 (2000)).

[0232] The term “CXCR2” refers to C—X—C motif chemokine receptor 2 (CXCR2) which is a receptor for interleukin 8 (IL-8) and a member of the G-protein-coupled receptor family. CXCR2 can mediate neutrophil migration to areas of inflammation.

[0233] The term “CCR2” refers to C—C chemokine receptor type 2 (CCR2) which is a receptor for monocyte chemoattractant protein 1. The inflammatory response in some cancers can be partially mediated by the activities of monocyte chemoattractant protein 1.

[0234] The term “ARG1” refers to Arginase-1 (ARG1) which is an enzyme that converts L-arginine to urea and L-ornithine. L-arginine and its downstream metabolites contribute to a suppressive tumor microenvironment through modulation of T-cell activity (Kim et al., FRONTIERS IN ONCOLOGY, 8:67 (2018)).

[0235] The term “PTGS2” refers to Prostaglandin-endoperoxide synthase 2 (PTGS2) which is also known as cyclooxygenase-2 or COX-2. PTGS2 is a key enzyme in prostaglandin synthesis. Prostaglandins can inhibit anti-tumor activities of some immune cells, contributing to a suppressive tumor microenvironment.

[0236] The term “CTLA-4” refers to Cytotoxic T-lymphocyte-associated protein 4 (CTLA-4) or cluster of differentiation 152 (CD152) which is a protein found on T cells that helps keep the immune responses in check. CTLA-4 was the first immune checkpoint target and CTLA-4 inhibitors have been developed as breakthrough anti-cancer treatments.

[0237] The term “SOCS1” refers to Suppressor of cytokine signaling 1 (SOCS1) which is a member of the STAT-induced STAT inhibitor (SSI) family. SOCS1 is a cytokine-inducible negative regulator of cytokine signaling.

[0238] As used herein, the term “cold tumor” or “non-inflamed tumor” refers to a tumor or tumor microenvironment wherein there is minimal to no presence of anti-tumor immune cells, such as tumor infiltrating lymphocytes (TILs), and/or contain cell subsets associated with immune suppression including regulatory T cells (Treg), myeloid-derived suppressor cells (MDSCs) and M2 macrophages. Specifically, in some embodiments, a cold tumor is characterized by a low number or even absence of infiltration of anti-tumor immune cells that such cells may be present but remain stuck in the surrounding stroma, thus unable to colonize the tumor microenvironment to provide their antitumor functions.

[0239] As used herein, “complementary” refers to a structural relationship between two nucleotides (e.g., on two opposing nucleic acids or on opposing regions of a single nucleic acid strand) that permits the two nucleotides to form base pairs with one another. For example, a purine nucleotide of one nucleic acid that is complementary to a pyrimidine nucleotide of an opposing nucleic acid may base pair together by forming hydrogen bonds with one another. In some embodiments, complementary nucleotides can base pair in the Watson-Crick manner or in any other manner that allows for the formation of stable duplexes. In some embodiments, two nucleic acids may have regions of multiple nucleotides that are complementary with each other to form regions of complementarity, as described herein.

[0240] As used herein, “species cross-reactive oligonucleotide” refers to an oligonucleotide capable of inhibiting expression of a target mRNA in more than one species. For example, in some embodiments a species cross-reactive oligonucleotide is capable of inhibiting expression of a target mRNA in human and non-human primates. Example species include but is not limited to human, non-human primates, mouse, and rat. In some embodiments, species cross-reactive oligonucleotides are capable of targeting and inhibiting mRNA in at least two, at least three, or at least four species.

[0241] As used herein, “deoxyribonucleotide” refers to a nucleotide having a hydrogen in place of a hydroxyl at the 2′ position of its pentose sugar when compared with a ribonucleotide. A modified deoxyribonucleotide is a deoxyribonucleotide having one or more modifications or substitutions of atoms other than at the 2′ position, including modifications or substitutions in or of the sugar, phosphate group or base.

[0242] As used herein, “double-stranded RNA” or “dsRNA” refers to an RNA oligonucleotide that is substantially in a duplex form. In some embodiments, the complementary base-pairing of duplex region(s) of a dsRNA oligonucleotide is formed between antiparallel sequences of nucleotides of covalently separate nucleic acid strands. In some embodiments, complementary base-pairing of duplex region(s) of a dsRNA formed between antiparallel sequences of nucleotides of nucleic acid strands that are covalently linked. In some embodiments, complementary base-pairing of duplex region(s) of a dsRNA is formed from single nucleic acid strand that is folded (e.g., via a hairpin) to provide complementary antiparallel sequences of nucleotides that base pair together. In some embodiments, a dsRNA comprises two covalently separate nucleic acid strands that are fully duplexed with one another. However, in some embodiments, a dsRNA comprises two covalently separate nucleic acid strands that are partially duplexed (e.g., having overhangs at one or both ends). In some embodiments, a dsRNA comprises antiparallel sequence of nucleotides that are partially complementary, and thus, may have one or more mismatches, which may include internal mismatches or end mismatches.

[0243] As used herein, “duplex,” in reference to nucleic acids (e.g., oligonucleotides), refers to a structure formed through complementary base pairing of two antiparallel sequences of nucleotides.

[0244] As used herein, “excipient” refers to a non-therapeutic agent that may be included in a composition, for example, to provide or contribute to a desired consistency or stabilizing effect.

[0245] As used herein, the term “hot tumor” or “inflamed tumor” refers to a tumor or tumor microenvironment wherein there is a considerable presence of anti-tumor immune cells especially TILs and thus are typically immuno-stimulatory.

[0246] As used herein, “loop” refers to an unpaired region of a nucleic acid (e.g., oligonucleotide) that is flanked by two antiparallel regions of the nucleic acid that are sufficiently complementary to one another, such that under appropriate hybridization conditions (e.g., in a phosphate buffer, in a cells), the two antiparallel regions, which flank the unpaired region, hybridize to form a duplex (referred to as a “stem”). The loop may refer to a loop comprising four nucleotides as a tetraloop (tetraL). The loop may refer to a loop comprising three nucleotides as a triloop (triL).

[0247] As used herein, “modified internucleotide linkage” refers to an internucleotide linkage having one or more chemical modifications when compared with a reference internucleotide linkage comprising a phosphodiester bond. In some embodiments, a modified nucleotide is a non-naturally occurring linkage. Typically, a modified internucleotide linkage confers one or more desirable properties to a nucleic acid in which the modified internucleotide linkage is present. For example, a modified nucleotide may improve thermal stability, resistance to degradation, nuclease resistance, solubility, bioavailability, bioactivity, reduced immunogenicity, etc.

[0248] As used herein, “modified nucleotide” refers to a nucleotide having one or more chemical modifications when compared with a corresponding reference nucleotide selected from: adenine ribonucleotide, guanine ribonucleotide, cytosine ribonucleotide, uracil ribonucleotide, adenine deoxyribonucleotide, guanine deoxyribonucleotide, cytosine deoxyribonucleotide and thymidine deoxyribonucleotide. In some embodiments, a modified nucleotide is a non-naturally occurring nucleotide. In some embodiments, a modified nucleotide has one or more chemical modification in its sugar, nucleobase and/or phosphate group. In some embodiments, a modified nucleotide has one or more chemical moieties conjugated to a corresponding reference nucleotide. Typically, a modified nucleotide confers one or more desirable properties to a nucleic acid in which the modified nucleotide is present. For example, a modified nucleotide may improve thermal stability, resistance to degradation, nuclease resistance, solubility, bioavailability, bioactivity, reduced immunogenicity, etc.

[0249] As used herein, “nicked tetraloop structure” refers to a structure of a RNAi oligonucleotide that is characterized by separate sense (passenger) and antisense (guide) strands, in which the sense strand has a region of complementarity with the antisense strand, and in which at least one of the strands, generally the sense strand, has a tetraloop configured to stabilize an adjacent stem region formed within the at least one strand.

[0250] As used herein, “oligonucleotide” refers to a short nucleic acid (e.g., less than about 100 nucleotides in length). An oligonucleotide may be single stranded (ss) or double-stranded (ds). An oligonucleotide may or may not have duplex regions. An oligonucleotide may comprise deoxyribonucleotides, ribonucleosides, or a combination of both. In some embodiments, a double-stranded oligonucleotide comprising ribonucleotides is referred to as “dsRNA”. As a set of non-limiting examples, an oligonucleotide may be, but is not limited to, a small interfering RNA (siRNA), microRNA (miRNA), short hairpin RNA (shRNA), dicer substrate interfering RNA (dsiRNA), antisense oligonucleotide, short siRNA or ss siRNA. In some embodiments, a double-stranded RNA (dsRNA) is an RNAi oligonucleotide.

[0251] The terms “RNAi oligonucleotide conjugate” and “oligonucleotide-ligand conjugate” are used interchangeably and refer to an oligonucleotide comprising one or more nucleotides conjugated with one or more targeting ligands.

[0252] As used herein, “overhang” refers to terminal non-base pairing nucleotide(s) resulting from one strand or region extending beyond the terminus of a complementary strand with which the one strand or region forms a duplex. In some embodiments, an overhang comprises one or more unpaired nucleotides extending from a duplex region at the 5′ terminus or 3′ terminus of a dsRNA. In certain embodiments, the overhang is a 3′ or 5′ overhang on the antisense strand or sense strand of a dsRNA.

[0253] As used herein, “phosphate analog” refers to a chemical moiety that mimics the electrostatic and/or steric properties of a phosphate group. In some embodiments, a phosphate analog is positioned at the 5′ terminal nucleotide of an oligonucleotide in place of a 5′-phosphate, which is often susceptible to enzymatic removal. In some embodiments, a 5′ phosphate analog contains a phosphatase-resistant linkage. Examples of phosphate analogs include, but are not limited to, 5′ phosphonates, such as 5′ methylene phosphonate (5′-MP) and 5′-(E)-vinylphosphonate (5′-VP). In some embodiments, an oligonucleotide has a phosphate analog at a 4′-carbon position of the sugar (referred to as a “4′-phosphate analog”) at a 5′-terminal nucleotide. An example of a 4′-phosphate analog is oxymethylphosphonate, in which the oxygen atom of the oxymethyl group is bound to the sugar moiety (e.g., at its 4′-carbon) or analog thereof. See, e.g., US Provisional Patent Application Nos. 62/383,207 (filed on 2 Sep. 2016) and 62/393,401 (filed on 12 Sep. 2016). Other modifications have been developed for the 5′ end of oligonucleotides (see, e.g., Intl. Patent Application No. WO 2011/133871; U.S. Pat. No. 8,927,513; and Prakash et al., (2015) NUCLEIC ACIDS RES. 43:2993-3011).

[0254] As used herein, “reduced expression” of a gene (e.g., STAT3) refers to a decrease in the amount or level of RNA transcript (e.g., STAT3 mRNA) or protein encoded by the gene and/or a decrease in the amount or level of activity of the gene in a cell, a population of cells, a sample, or a subject, when compared to an appropriate reference (e.g., a reference cell, population of cells, sample, or subject). For example, the act of contacting a cell with an oligonucleotide herein (e.g., an oligonucleotide comprising an antisense strand having a nucleotide sequence that is complementary to a nucleotide sequence comprising STAT3 mRNA) may result in a decrease in the amount or level of STAT3 mRNA, protein and/or activity (e.g., via degradation of STAT3 mRNA by the RNAi pathway) when compared to a cell that is not treated with the dsRNA. Similarly, and as used herein, “reducing expression” refers to an act that results in reduced expression of a gene (e.g., STAT3). As used herein, “reduction of STAT3 expression” refers to a decrease in the amount or level of STAT3 mRNA, STAT3 protein and/or STAT3 activity in a cell, a population of cells, a sample or a subject when compared to an appropriate reference (e.g., a reference cell, population of cells, sample, or subject).

[0255] As used herein, “region of complementarity” refers to a sequence of nucleotides of a nucleic acid (e.g., a dsRNA) that is sufficiently complementary to an antiparallel sequence of nucleotides to permit hybridization between the two sequences of nucleotides under appropriate hybridization conditions (e.g., in a phosphate buffer, in a cell, etc.). In some embodiments, an oligonucleotide herein comprises a targeting sequence having a region of complementary to a mRNA target sequence.

[0256] As used herein, “ribonucleotide” refers to a nucleotide having a ribose as its pentose sugar, which contains a hydroxyl group at its 2′ position. A modified ribonucleotide is a ribonucleotide having one or more modifications or substitutions of atoms other than at the 2′ position, including modifications or substitutions in or of the ribose, phosphate group or base.

[0257] As used herein, “RNAi oligonucleotide” refers to either (a) a dsRNA having a sense strand (passenger) and antisense strand (guide), in which the antisense strand or part of the antisense strand is used by the Argonaute 2 (Ago2) endonuclease in the cleavage of a target mRNA or (b) a ss oligonucleotide having a single antisense strand, where that antisense strand (or part of that antisense strand) is used by the Ago2 endonuclease in the cleavage of a target mRNA.

[0258] As used herein, “strand” refers to a single, contiguous sequence of nucleotides linked together through internucleotide linkages (e.g., phosphodiester linkages or phosphorothioate linkages). In some embodiments, a strand has two free ends (e.g., a 5′ end and a 3′ end).

[0259] As used herein, “subject” means any mammal, including mice, rabbits, non-human primates (NHP), and humans. In one embodiment, the subject is a human or NHP. Moreover, “individual” or “patient” may be used interchangeably with “subject.”

[0260] As used herein, “synthetic” refers to a nucleic acid or other molecule that is artificially synthesized (e.g., using a machine (e.g., a solid-state nucleic acid synthesizer)) or that is otherwise not derived from a natural source (e.g., a cell or organism) that normally produces the molecule.

[0261] As used herein, “targeting ligand” refers to a molecule or “moiety” (e.g., a carbohydrate, amino sugar, cholesterol, polypeptide, or lipid) that selectively binds to a cognate molecule (e.g., a receptor) of a tissue or cell of interest and/or that is conjugatable to another substance for purposes of targeting the other substance to the tissue or cell of interest. For example, in some embodiments, a targeting ligand may be conjugated to an oligonucleotide for purposes of targeting the oligonucleotide to a specific tissue or cell of interest. In some embodiments, a targeting ligand selectively binds to a cell surface receptor. Accordingly, in some embodiments, a targeting ligand when conjugated to an oligonucleotide facilitates delivery of the oligonucleotide into a particular cell through selective binding to a receptor expressed on the surface of the cell and endosomal internalization by the cell of the complex comprising the oligonucleotide, targeting ligand and receptor. In some embodiments, a targeting ligand is conjugated to an oligonucleotide via a linker that is cleaved following or during cellular internalization such that the oligonucleotide is released from the targeting ligand in the cell.

[0262] As used herein, “loop”, “triloop”, or “tetraloop” refers to a loop that increases stability of an adjacent duplex formed by hybridization of flanking sequences of nucleotides. The increase in stability is detectable as an increase in melting temperature (Tₘ) of an adjacent stem duplex that is higher than the Tₘ of the adjacent stem duplex expected, on average, from a set of loops of comparable length consisting of randomly selected sequences of nucleotides. For example, a loop (e.g., a tetraloop or triloop) can confer a Tₘ of at least about 50° C., at least about 55° C., at least about 56° C., at least about 58° C., at least about 60° C., at least about 65° C. or at least about 75° C. in 10 mM NaHPO₄ to a hairpin comprising a duplex of at least 2 base pairs (bp) in length. In some embodiments, a loop (e.g., a tetraloop) may stabilize a bp in an adjacent stem duplex by stacking interactions. In addition, interactions among the nucleotides in a tetraloop include, but are not limited to, non-Watson-Crick base pairing, stacking interactions, hydrogen bonding and contact interactions (Cheong et al., (1990) NATURE 346:680-82; Heus and Pardi (1991) SCIENCE 253:191-94). In some embodiments, a loop comprises or consists of 3 to 6 nucleotides and is typically 4 to 5 nucleotides. In certain embodiments, a loop comprises or consists of 3, 4, 5 or 6 nucleotides, which may or may not be modified (e.g., which may or may not be conjugated to a targeting moiety). In some embodiments, a tetraloop comprises or consists of 3 to 6 nucleotides and is typically 4 to 5 nucleotides. In certain embodiments, a tetraloop comprises or consists of 3, 4, 5 or 6 nucleotides, which may or may not be modified (e.g., which may or may not be conjugated to a targeting moiety). In one embodiment, a loop consisting of 4 nucleotides is a tetraloop. Any nucleotide may be used in the loop (e.g., a tetraloop) and standard IUPAC-IUB symbols for such nucleotides may be used as described in Cornish-Bowden ((1985) NUCLEIC ACIDS RES. 13:3021-3030). For example, the letter “N” may be used to mean that any base may be in that position, the letter “R” may be used to show that A (adenine) or G (guanine) may be in that position, and “B” may be used to show that C (cytosine), G (guanine), or T (thymine) may be in that position. Examples of tetraloops include the UNCG family of tetraloops (e.g., UUCG), the GNRA family of tetraloops (e.g., GAAA), and the CUUG tetraloop (Woese et al., (1990) PROC. NATL. ACAD. SCI. USA 87:8467-71; Antao et al., (1991) NUCLEIC ACIDS RES. 19:5901-05). Examples of DNA tetraloops include the d(GNNA) family of tetraloops (e.g., d(GTTA), the d(GNRA)) family of tetraloops, the d(GNAB) family of tetraloops, the d(CNNG) family of tetraloops, and the d(TNCG) family of tetraloops (e.g., d(TTCG)). (See, e.g., Nakano et al., (2002) BIOCHEM. 41:4281-92; Shinji et al., (2000) NIPPON KAGAKKAI KOEN YOKOSHU 78:731). In some embodiments, the tetraloop is contained within a nicked tetraloop structure.

[0263] As used herein, “treat” or “treating” refers to the act of providing care to a subject in need thereof, for example, by administering a therapeutic agent (e.g., an oligonucleotide herein) to the subject, for purposes of improving the health and/or well-being of the subject with respect to an existing condition (e.g., a disease, disorder) or to prevent or decrease the likelihood of the occurrence of a condition. In some embodiments, treatment involves reducing the frequency or severity of at least one sign, symptom or contributing factor of a condition (e.g., disease, disorder) experienced by a subject.

[0264] As used herein, the term “tumor microenvironment” relates to the cellular environment in which any given tumor exists, including the tumor stroma, surrounding blood vessels, immune cells, fibroblasts, other cells, signaling molecules, and the ECM. It is understood that the tumor microenvironment harbors and/or surrounds the tumor cells with which it interacts.

### Oligonucleotide Conjugates for Delivery to Immune Cells in the Tumor Microenvironment

[0265] The tumor microenvironment (TME) plays a key role in sustaining tumor growth, invasion, and ultimately metastasis. The complex TME is comprised in part by immune cells, fibroblasts, and blood vessels. The immune cell composition in the TME is typically categorized as a “cold” or “hot” tumor. Cold tumors have a dampened immune response due at least in part to the presence of myeloid-derived suppressor cells (MDSC) and T regulatory cells (Tregs). Both MDSCs and Tregs dampen the ability of T-cells to infiltrate the tumor and induce an anti-tumor response. Hot tumors show infiltration of cancer-fighting T cells demonstrating a combative anti-tumor response. Cold tumors are generally less responsive to immunotherapy treatments compared to hot tumors. Therapies to convert the tumor immune environment from a cold to hot environment are needed.

mRNA Target Sequences

[0266] In some embodiments, the oligonucleotide-ligand conjugate is targeted to an mRNA target sequence in an immune cell associated with a tumor microenvironment via the targeting ligand. In some embodiments, the oligonucleotide-ligand conjugate, or a portion, fragment, or strand thereof (e.g., an antisense strand or a guide strand of a double-stranded oligonucleotide) binds or anneals to a target mRNA sequence, thereby reducing expression of the target mRNA. In some embodiments, the oligonucleotide-ligand conjugate is targeted to an mRNA target sequence in an immune cell associated with a tumor microenvironment via the targeting ligand for the purpose of reducing expression of the target mRNA in vivo. In some embodiments, the amount or extent of reduction of expression of the target mRNA by an oligonucleotide-ligand conjugate correlates with the potency of the oligonucleotide-ligand conjugate. In some embodiments, the amount or extent of reduction of expression of the target mRNA by an oligonucleotide-ligand conjugate correlates with the amount or extent of therapeutic benefit in a subject or patient having cancer treated with the oligonucleotide-ligand conjugate.

[0267] Through examination of the nucleotide sequence of target mRNAs, including mRNAs of multiple different species (e.g., human, cynomolgus monkey, mouse, and rat) and as a result of in vitro and in vivo testing, it has been discovered that certain target mRNA sequences are more amenable than others to oligonucleotide-mediated reduction and are thus useful as target sequences for the oligonucleotide-ligand conjugate herein. In some embodiments, a sense strand of an oligonucleotide-ligand conjugate (e.g., RNAi oligonucleotide-lipid conjugate), or a portion or fragment thereof, described herein, comprises a nucleotide sequence that is similar (e.g., having no more than 4 mismatches) or is identical to a target mRNA sequence. In some embodiments, a portion or region of the sense strand of a double-stranded oligonucleotide described herein comprises a target mRNA sequence.

[0268] In some embodiments, the oligonucleotide-ligand conjugate targets an mRNA encoding a regulator of immune suppression expressed by an immune cell in a TME. In some embodiments, the regulator of immune suppression directly or indirectly impacts immune regulation. For example, in some embodiments, the regulator of immune suppression is a regulatory protein, an enzymatic protein, or a signaling protein. In some embodiments, the regulator of immune suppression is a polypeptide that controls immune signaling. In some embodiments, the regulator of immune suppression is an enzyme involved in processing a polypeptide involved in immune regulation. In some embodiments, the regulator of immune suppression is a checkpoint inhibitor polypeptide. In some embodiments, the regulator of immune suppression is a transcription factor. In some embodiments, the regulator of immune suppression is a cytokine. In some embodiments, the regulator of immune suppression is a chemokine receptor.

[0269] Both wild-type and mutated genes encoding immune regulators are capable of modifying the immune response in the TME or tumor draining lymph node (TdLN). In some embodiments, the oligonucleotide-ligand conjugate targets a wild-type mRNA encoding a regulator of immune suppression expressed by an immune cell in a TME. In some embodiments, the oligonucleotide-ligand conjugate targets a wild-type mRNA encoding a regulator of immune suppression expressed by an immune cell in a TdLN. In some embodiments, the oligonucleotide-ligand conjugate targets a mutated mRNA encoding a regulator of immune suppression expressed by an immune cell in a TME. In some embodiments, the oligonucleotide-ligand conjugate targets a mutated mRNA encoding a regulator of immune suppression expressed by an immune cell in a TdLN. Mutated mRNA molecules produce misfolded proteins or hyperactive proteins.

[0270] In some embodiments, the oligonucleotide-ligand conjugate directly or indirectly reduces expression of proteins that contribute to the suppressive function of M-MDSC's. In some embodiments, the oligonucleotide-ligand conjugate directly or indirectly reduces expression of proteins that contribute to the suppressive function of G-MDSC's.

[0271] In some embodiments, the oligonucleotide-ligand conjugate reduces target mRNA expression by at least 10%, at least 20%, at least 30%, at least 40%, at least 50%, at least 60%, at least 70%, at least 80%, at least 90%, or at least 95% in an immune cell of the TME. In some embodiments, the oligonucleotide-ligand conjugate reduces expression of the regulator of immune suppression by about 10%, about 20%, about 30%, about 40%, about 50%, about 60%, about 70%, about 80%, or about 90% in an immune cell of the TME.

[0272] In some embodiments, the oligonucleotide-ligand conjugate reduces target mRNA expression by at least 10%, at least 20%, at least 30%, at least 40%, at least 50%, at least 60%, at least 70%, at least 80%, at least 90%, or at least 95% in an immune cell of the TdLN. In some embodiments, the oligonucleotide-ligand conjugate reduces expression of the regulator of immune suppression by about 10%, about 20%, about 30%, about 40%, about 50%, about 60%, about 70%, about 80%, or about 90% in an immune cell of the TdLN.

### Immune Cells in a Tumor Microenvironment

[0273] In some aspects, the disclosure provides oligonucleotide-ligand conjugates that reduce expression of a target mRNA expressed in an immune cell present in a tumor and/or tumor microenvironment. In some embodiments, the oligonucleotide-ligand conjugate targets a suppressive immune cell in the tumor microenvironment. In some embodiments, the targeting ligand of the conjugate delivers the oligonucleotide to an immune cell present in a tumor.

[0274] In healthy individuals, immature myeloid cells produced from bone marrow differentiate into mature granulocytes, macrophages or dendritic cells and go on to become part of the innate immune system (Weiskopf et al., MICROBIOL SPECTR. October; 4(5) (2016)). In pathological conditions such as cancer, a partial block in the differentiation of immature myeloid cells into mature myeloid cells can result in an expansion of the population of immature myeloid cells (Gabrilovitch et al., NAT REV IMMUNOL. March; 9(3): 162-74 (2009)) incapable of assisting in cancer monitoring or removal. Under the influence of GM-CSF secreted by cancer cells, these excess myeloid cells are recruited from bone marrow to the tumor site (Schmid and Varner. JOURNAL OF ONCOLOGY (2010)). Once within the TME, the myeloid cell population expands, and the cells exert immune suppressive functions that enables them to suppress T cells and NK cells through different mechanisms (Yang et al., FRONT. IN IMMUNOL. 11:1371 (2020)) directly inhibiting a response to the cancer tumor.

[0275] Myeloid derived suppressor cells (MDSCs) contribute to immunotherapeutic resistance by actively inhibiting anti-tumor T-cell proliferation and cytotoxic activity, as well as by promoting expansion of immunosuppressive T regulatory cells (Gabrilovich et al., NAT REV IMMUNOL (2009) 9(3): 162-74, Law et al., CELLS (2020) 9: 561). In this way MDSCs can inhibit or attenuate the host immune response against a tumor. In addition, these MDSCs can also assist in cell dissemination through the promotion of angiogenesis, EMT and MET transition as well as in the secretion of tumorigenic factors. (Law et al., CELLS (2020) 9: 561). Given their importance in the development, maintenance, and assistance in the expansion of tumors with which they are associated MDSCs are potential therapeutic targets for many tumor types if they can be attacked specifically. MDSCs can also be found in tumor draining lymph nodes (TdLN) where they can have a suppressive effect on naïve T cells also found in tumor draining lymph nodes (Swatz et al., NAT REV CANCER (2012) 12: 210-19). Suppression of naïve T cells can then set the stage for tumors to metastasize into the lymph nodes and beyond (Swatz et al., NAT REV CANCER (2012) 12: 210-19). Collectively, MDSCs are characterized by the co-expression of cell surface or mRNA markers CD11b (a marker for the myeloid cells of the macrophage lineage) and Gr-1 (a marker for the myeloid lineage differentiation antigen) and denoted as CD11b⁺Gr-1⁺ cells. Gr-1 is further comprised of 2 components Ly6G and Ly6C. MDSCs consist of two subsets: Granulocytic MDSC (G-MDSC), further characterized as CD11b⁺Ly6G⁺Ly6C^{lo}, and monocytic MDSC (M-MDSC) characterized as CD11b⁺Ly6G⁻Ly6C^{hi}. mRNA markers Ly6G, CxCr2, Slc27a2 and Ptgs2 are preferentially expressed by G-MDSCs and not by M-MDSCs. Expression of specific markers such as CxCr2, Scl27a2 and Ptgs2 suggest the recruitment and suppression activity of G-MDSCs in the TME. Likewise, mRNA markers Ly6C, Scarb1, Ldlr and Arg1 are highly expressed by M-MDSCs compared to G-MDSCs. Higher expression of lipid trafficking receptors such as Scarb1 and Ldlr in M-MDSCs may play key role in lipid uptake.

[0276] In some embodiments, the oligonucleotide-ligand conjugate targets a tumor resident immune cell. In some embodiments, the oligonucleotide-ligand conjugate targets an immune cell in the tumor draining lymph node (TdLN). In some embodiments, the oligonucleotide-ligand conjugate targets an mRNA in a tumor resident immune cell. In some embodiments, the oligonucleotide-ligand conjugate targets an mRNA in an immune cell in the tumor draining lymph node (TdLN).

[0277] In some embodiments, the immune cell is a suppressive myeloid cell. In some embodiments, the immune cell is a myeloid derived suppressor cell (MDSC). In some embodiments, the MDSC is a granulocytic MDSC (G-MDSC). In some embodiments, the MDSC is a monocytic MDSC (M-MDSC).

[0278] In some embodiments, the immune cell is a T-cell. In some embodiments, the T cell is a CD8+ T cell. In some embodiments, the T-cell is a Treg cell.

[0279] In some embodiments, the oligonucleotide-ligand conjugate reduces a target mRNA in a tumor resident and/or tumor draining lymph node MDSC. In some embodiments, the oligonucleotide conjugate reduces a target mRNA in a tumor resident and/or tumor draining lymph node G-MDSC. In some embodiments, the oligonucleotide-ligand conjugate reduces a target mRNA in a tumor resident and/or tumor draining lymph node M-MDSC. In some embodiments, the oligonucleotide-ligand conjugate reduces a target mRNA in a tumor resident and/or tumor draining lymph node Treg cell. In some embodiments, the oligonucleotide-ligand conjugate reduces a target mRNA in more than one type tumor resident and/or tumor draining lymph node immune cell. For example, in some embodiments, the oligonucleotide-ligand conjugate reduces a target mRNA in a MDSC (e.g., M-MDSC and/or G-MDSC) and a T cell (e.g., CD8+ T cell and/or Treg cell).

[0280] In some embodiments, the immunosuppressive activity of the immune cell (e.g. MDSC or Treg cell) is reduced after contact with the oligonucleotide-ligand conjugate. Immunosuppressive activity is measured using known methods in the art. In one such method, Arginase I levels are measured in isolated tumor immune cells compared to control immune cells. High Arginase I levels in tumor resident immune cells (e.g. myeloid cells) is indicative of an immunosuppressive environment. Additionally, in some embodiments the number of immune suppressive tumor resident cells indicates the level of suppressive activity. In some embodiments, T-cell suppression assays and/or cytokine release assays are used to measure the suppressive activity of an immune cell.

### Cancers

[0281] In some embodiments, the oligonucleotide-ligand conjugate described herein targets immune cells in a tumor. In some embodiments, the tumor is a primary tumor. In some embodiments, the tumor is a metastatic tumor. In some embodiments, the tumor is a refractory tumor. In some embodiments, the tumor is a Stage I, Stage II, Stage III, or Stage IV tumor. In some embodiments, the tumor is a solid-tumor. Solid-tumors refer to conditions where the cancer forms a mass

[0282] In some embodiments, the cancer is a thyroid cancer, papillary thyroid carcinoma, head and neck cancer, liver cancer, colorectal cancer, pancreatic cancer, breast cancer, ovarian cancer, lung cancer, carcinoma, blastoma, medulloblastoma, retinoblastoma, sarcoma, liposarcoma, synovial cell sarcoma, neuroendocrine tumors, carcinoid tumors, gastrinoma, islet cell cancer, mesothelioma, schwannoma, acoustic neuroma, meningioma, adenocarcinoma, lymphoid malignancies, squamous cell cancer, epithelial squamous cell cancer, small-cell lung cancer (SCLC), non-small cell lung cancer (NSCLC), adenocarcinoma of the lung, squamous carcinoma of the lung, cancer of the peritoneum, hepatocellular cancer, gastric or stomach cancer, gastrointestinal cancer, glioblastoma, cervical cancer, bladder cancer, hepatoma, metastatic breast cancer, colon cancer, rectal cancer, endometrial or uterine carcinoma, salivary gland carcinoma, kidney or renal cancer, prostate cancer, vulval cancer, hepatic carcinoma, anal carcinoma, penile carcinoma, Merkel cell cancer, testicular cancer, esophageal cancer, or tumors of the biliary tract. In some embodiments, the cancer is refractory to anti-PD1, anti-PDL1 and/or anti-CTLA4 therapy. In some embodiments, the cancer is a pancreatic cancer or lung cancer. In some embodiments, the cancer comprises tumors with immunosuppressive tumor microenvironments.

[0283] In some embodiments, the oligonucleotide-ligand conjugate is delivered to the tumor and reduces a target mRNA's expression in a tumor resident immune cell.

[0284] In some embodiments, the oligonucleotide-ligand conjugate reduces tumor volume. Tumor volume is measured using methods know to one of skill in the art. For example, extracted tumors are measured manually using calipers. Other methods include imagine methods such as ultrasound and MRI. In some embodiments, the oligonucleotide conjugate reduces tumor volume by at least 5%, at least 10%, at least 20%, at least 30%, at least 40%, at least 50%, at least 60%, at least 70%, at least 80%, or at least 90% compared to an untreated tumor.

[0285] Tumor draining lymph nodes (TdLN) are the generally the first site of metastasis for cancer. In some embodiments, the oligonucleotide conjugate targets immune cells in the tumor draining lymph node. In some embodiments, the tumor draining lymph node is the subsegmental, segmental, lobar, interlobar, hilar, mediastinal, supratrochlear, deltoideopectoral, lateral, pectoral, subscapular, intermediate, subclavicular, superficial inguinal, deep inguinal, popliteal, facial buccinators, facial nasolabial, prostate, mandibular, submental, occipital, mastoid/retroauricular, parotid, deep preauricular, deep infra-auricular, deep intraglandular, deep cervical, deep anterior cervical, pretracheal, paratracheal, prelaryngeal, thyroid, deep lateral cervical, superior deep cervical, inferior deep cervical, retropharyngeal, jugulodigastric, anterior cervical, lateral cervical, supraclavicular, retroaortic, lateral aortic, celiac, gastric, hepatic, splenic, superior mesenteric, mesenteric, ileocolic, mesocolic, inferior mesenteric, or pararectal lymph node. In some embodiments, the tumor draining lymph node is a primary tumor draining lymph node. In some embodiments, the tumor draining lymph node is a lymph node that drains a tumor metastasis.

[0286] In some embodiments, the oligonucleotide-ligand conjugate does not target immune cells in the non-TdLN. In some embodiments, the oligonucleotide-ligand conjugate does not target cancer cells.

[0287] In some embodiments, the oligonucleotide-ligand conjugate targets immune cells in both the tumor and tumor draining lymph nodes. In some embodiments, the oligonucleotide-ligand conjugate reduces target mRNA in immune cells in a TdLN by at least 10%, at least 20%, at least 30%, at least 40%, at least 50%, at least 60%, at least 70%, at least 80%, or at least 90%.

### Structure of Oligonucleotide-Targeting Ligand Conjugates

[0288] In some embodiments, an oligonucleotide-ligand conjugate described herein comprises a nucleotide sequence and one or more targeting ligands, wherein the nucleotide sequence comprises one or more nucleosides (nucleic acids) conjugated with one or more targeting ligands represented by formula I-a:

[chemical structure]

or a pharmaceutically acceptable salt thereof,
wherein:
[0289] B is a nucleobase or hydrogen;
[0290] R¹ and R² are independently hydrogen, halogen, R^{A}, —CN, —S(O)R, —S(O)₂R, —Si(OR)₂R, —Si(OR)R₂, or —SiR₃; or
   [0291] R¹ and R² on the same carbon are taken together with their intervening atoms to form a 3-7 membered saturated or partially unsaturated ring having 0-3 heteroatoms, independently selected from nitrogen, oxygen, and sulfur;
[0292] each R^{A} is independently an optionally substituted group selected from C₁₋₆ aliphatic, phenyl, a 4-7 membered saturated or partially unsaturated heterocyclic ring having 1-2 heteroatoms independently selected from nitrogen, oxygen, and sulfur, and a 5-6 membered heteroaryl ring having 1-4 heteroatoms independently selected from nitrogen, oxygen, and sulfur;
[0293] each R is independently hydrogen, a suitable protecting group, or an optionally substituted group selected from C₁₋₆ aliphatic, phenyl, a 4-7 membered saturated or partially unsaturated heterocyclic having 1-2 heteroatoms independently selected from nitrogen, oxygen, and sulfur, and a 5-6 membered heteroaryl ring having 1-4 heteroatoms independently selected from nitrogen, oxygen, and sulfur; or
   [0294] two R groups on the same atom are taken together with their intervening atoms to form a 4-7 membered saturated, partially unsaturated, or heteroaryl ring having 0-3 heteroatoms, independently selected from nitrogen, oxygen, silicon, and sulfur;
[0295] each targeting ligand is selected from lipid conjugate moiety (LC), carbohydrate, amino sugar or

[0296] GalNAc; and wherein each LC is independently a lipid conjugate moiety comprising a saturated or unsaturated, straight, or branched C₁₋₅₀ hydrocarbon chain, wherein 0-10 methylene units of the hydrocarbon chain are independently replaced by -Cy-, —O—, —C(O)NR—, —NR—, —S—, —C(O)—, —C(O)O—, —S(O)—, —S(O)₂—, —P(O)OR—, —P(S)OR—;
[0297] each -Cy- is independently an optionally substituted bivalent ring selected from phenylenyl, an 8-10 membered bicyclic arylenyl, a 4-7 membered saturated or partially unsaturated carbocyclylenyl, a 4-11 membered saturated or partially unsaturated spiro carbocyclylenyl, an 8-10 membered bicyclic saturated or partially unsaturated carbocyclylenyl, a 4-7 membered saturated or partially unsaturated heterocyclylenyl having 1-3 heteroatoms independently selected from nitrogen, oxygen, and sulfur, a 4-11 membered saturated or partially unsaturated spiro heterocyclylenyl having 1-2 heteroatoms independently selected from nitrogen, oxygen, and sulfur, an 8-10 membered bicyclic saturated or partially unsaturated heterocyclylenyl having 1-2 heteroatoms independently selected from nitrogen, oxygen, and sulfur, a 5-6 membered heteroarylenyl having 1-4 heteroatoms independently selected from nitrogen, oxygen, and sulfur, or an 8-10 membered bicyclic heteroarylenyl having 1-5 heteroatoms independently selected from nitrogen, oxygen, or sulfur;
[0298] n is 1-10;
[0299] L is a covalent bond or a bivalent saturated or unsaturated, straight or branched C₁₋₅₀ hydrocarbon chain, wherein 0-10 methylene units of the hydrocarbon chain are independently replaced by -Cy-, —O—, —C(O)NR—, —NR—, —S—, —C(O)—, —C(O)O—, —S(O)—, —S(O)₂—, —P(O)OR—, —P(S)OR—, —V¹CR²W¹—, or

[chemical structure]

[0300] m is 1-50;
[0301] X¹, V¹ and W¹ are independently —C(R)₂—, —OR, —O—, —S—, —Se—, or —NR—;
[0302] Y is hydrogen, a suitable hydroxyl protecting group,

[chemical structure]

[0303] R³ is hydrogen, a suitable protecting group, a suitable prodrug, or an optionally substituted group selected from C₁₋₆ aliphatic, phenyl, a 4-7 membered saturated or partially unsaturated heterocyclic ring having 1-2 heteroatoms independently selected from nitrogen, oxygen, and sulfur, and a 5-6 membered heteroaryl ring having 1-4 heteroatoms independently selected from nitrogen, oxygen, and sulfur;
[0304] X² is O, S, or NR;
[0305] X³ is —O—, —S—, —BH₂—, or a covalent bond;
[0306] Y¹ is a linking group attaching to the 2′- or 3′-terminal of a nucleoside, a nucleotide, or an oligonucleotide;
[0307] Y² is hydrogen, a suitable protecting group, a phosphoramidite analogue, an internucleotide linking group attaching to the 5′-terminal of a nucleoside, a nucleotide, or an oligonucleotide, or a linking group attaching to a solid support; and
[0308] Z is —O—, —S—, —NR—, or —CR₂—.

[0309] In some embodiments, the oligonucleotide-ligand conjugate comprises one or more nucleic acids conjugated with targeting ligands represented by formula II-a:

[chemical structure]

or a pharmaceutically acceptable salt thereof.

[0310] In some embodiments, the oligonucleotide-ligand conjugate comprises one or more nucleic acids conjugated with targeting ligands represented by formula II-b or II-c:

[chemical structure]

or a pharmaceutically acceptable salt thereof, wherein:
[0311] L¹ is a covalent bond, a monovalent or a bivalent saturated or unsaturated, straight or branched
[0312] C¹⁻⁵⁰ hydrocarbon chain, wherein 0-10 methylene units of the hydrocarbon chain are independently replaced by -Cy-, —O—, —C(O)NR—, —NR—, —S—, —C(O)—, —C(O)O—, —S(O)—, —S(O)₂—, —P(O)OR—, —P(S)OR—, or

[chemical structure]

[0313] R⁴ is hydrogen, R^{A}, or a suitable amine protection group; and
[0314] R⁵ is adamantyl, or a saturated or unsaturated, straight, or branched C₁₋₅₀ hydrocarbon chain, wherein 0-10 methylene units of the hydrocarbon chain are independently replaced by —O—, —C(O)NR—, —NR—, —S—, —C(O)—, —C(O)O—, —S(O)—, —S(O)₂—, —P(O)OR—, or —P(S)OR. In some embodiments, R⁵ is selected from

[chemical structure]

[0315] In some embodiments, R⁵ is selected from:

[chemical structure]

[0316] In some embodiments, R⁵ is

[chemical structure]

In some embodiments, R⁵ is

[chemical structure]

In some embodiments, R⁵ is

[chemical structure]

In some embodiments, R⁵ is

[chemical structure]

In some embodiments, R⁵ is

[chemical structure]

In some embodiments, R⁵ is

[chemical structure]

In some embodiments, R⁵ is

[chemical structure]

In some embodiments, R⁵ is

[chemical structure]

In some embodiments, R⁵ is

[chemical structure]

In some embodiments, R⁵ is

[chemical structure]

In some embodiments, R⁵ is

[chemical structure]

In some embodiments, R⁵ is

[chemical structure]

In some embodiments, R⁵ is

[chemical structure]

In some embodiments, R⁵ is

[chemical structure]

[0317] In some embodiments, the oligonucleotide-ligand conjugate comprises one or more nucleic acids conjugated with targeting ligands represented by formula II-Ib or II-Ic:

[chemical structure]

or a pharmaceutically acceptable salt thereof; wherein
[0318] B is a nucleobase or hydrogen;
[0319] m is 1-50;
[0320] X¹ is —O—, or —S—;
[0321] Y is hydrogen,

[chemical structure]

[0322] R³ is hydrogen, or a suitable protecting group;
[0323] X² is O, or S;
[0324] X³ is —O—, —S—, or a covalent bond;
[0325] Y¹ is a linking group attaching to the 2′- or 3′-terminal of a nucleoside, a nucleotide, or an oligonucleotide;
[0326] Y² is hydrogen, a phosphoramidite analogue, an internucleotide linking group attaching to the 5′-terminal of a nucleoside, a nucleotide, or an oligonucleotide, or a linking group attaching to a solid support;
[0327] R⁵ is adamantyl, or a saturated or unsaturated, straight, or branched C₁₋₅₀ hydrocarbon chain, wherein 0-10 methylene units of the hydrocarbon chain are independently replaced by —O—, —C(O)NR—, —NR—, —S—, —C(O)—, —C(O)O—, —S(O)—, —S(O)₂—, —P(O)OR—, or —P(O)OR—; and
[0328] R is hydrogen, a suitable protecting group, or an optionally substituted group selected from C¹⁻⁶ aliphatic, phenyl, a 4-7 membered saturated or partially unsaturated heterocyclic having 1-2 heteroatoms independently selected from nitrogen, oxygen, and sulfur, and a 5-6 membered heteroaryl ring having 1-4 heteroatoms independently selected from nitrogen, oxygen, and sulfur.

[0329] In some embodiments, R⁵ is selected from

[chemical structure]

[0330] In some embodiments, R⁵ is

[chemical structure]

[0331] In some embodiments, R⁵ is

[chemical structure]

[0332] In some embodiments, the nucleotide sequence of the oligonucleotide comprises 1-10 targeting ligands. In some embodiments, the nucleotide sequence comprises 1, 2 or 3 targeting ligands.

[0333] In some embodiments, the oligonucleotide of the oligonucleotide-ligand conjugate is a double-stranded molecule. In some embodiments, the oligonucleotide is an RNAi molecule. In some embodiments, the double stranded oligonucleotide comprises a stem loop. In some embodiments, the ligand is conjugated to any of the nucleotides in the stem loop. In some embodiments, the ligand is conjugated to the first nucleotide from 5′ to 3′, in the stem loop. In some embodiments, the ligand is conjugated to the second nucleotide from 5′ to 3′ in the stem loop. In some embodiments, the ligand is conjugated to the third nucleotide from 5′ to 3′ in the stem loop. In some embodiments, the ligand is conjugated to the fourth nucleotide from 5′ to 3′ in the stem loop. In some embodiments, the ligand is conjugated to one, two, three, or four of the nucleotides in the stem loop. In some embodiments, the ligand is conjugated to three of the nucleotides in the stem loop.

[0334] In some embodiments, the oligonucleotide-ligand conjugate comprises a sense strand of 36 nucleotides with positions numbered 1-36 from 5′ to 3′. In some embodiments, the oligonucleotide-ligand conjugate comprises a lipid conjugated to position 27 of a 36-nucleotide sense strand. In some embodiments, the oligonucleotide-ligand conjugate comprises a lipid conjugated to position 28 of a 36-nucleotide sense strand. In some embodiments, the oligonucleotide conjugate comprises a lipid conjugated to position 29 of a 36-nucleotide sense strand. In some embodiments, the oligonucleotide conjugate comprises a lipid conjugated to position 30 of a 36-nucleotide sense strand.

[0335] In some embodiments, an oligonucleotide-ligand conjugate comprises an antisense strand of 15 to 30 nucleotides and a sense strand of 15 to 40 nucleotide, wherein the sense and antisense strands form a duplex region, wherein the antisense strand comprises a region of complementarity to a target sequence expressed in an immune cell associated with a tumor microenvironment, wherein the sense strand comprises at its 3′ end a stem-loop comprising a tetraloop comprising 4 nucleosides, wherein one or more of the 4 nucleosides is represented by formula II-Ib:

[chemical structure]

wherein B is selected from an adenine and a guanine nucleobase, and wherein R⁵ is a hydrocarbon chain. In some embodiments, m is 1, X1 is O, Y2 is an internucleotide linking group attaching to the 5′ terminal of a nucleoside,

[0336] Y is represented by

[chemical structure]

Y1 is a linking group attaching to the 2′ or 3′ terminal of a nucleotide, X2 is O, X3 is O, and R3 is H. In some embodiments, the hydrocarbon chain is a C8-C30 hydrocarbon chain. In some embodiments, the hydrocarbon chain is a C16 hydrocarbon chain. In some embodiments, the C16 hydrocarbon chain is represented by

[chemical structure]

In some embodiments, the 4 nucleosides of the tetraloop are numbered 1-4 from 5′ to 3′ and position 1 is represented by formula II-Ib. In some embodiments, position 2 is represented by formula II-Ib. In some embodiments, position 3 is represented by formula II-Ib. In some embodiments, position 4 is represented by formula II-Ib. In some embodiments, the sense strand is 36 nucleotides with positions numbered 1-36 from 5′ to 3′, wherein the stem-loop comprises nucleotides at positions 21-36, and wherein one or more nucleosides at positions 27-30 are represented by formula II-Ib. In some embodiments, the antisense strand is 22 nucleotides.

[0337] In some aspects, the disclosure provides oligonucleotide-ligand conjugates for targeting a target mRNA (e.g., a target mRNA regulating immune suppression) and inhibiting or reducing target gene expression (e.g., via the RNAi pathway), wherein the oligonucleotide-ligand conjugate is a double-stranded (ds) nucleic acid molecule comprising a sense strand (also referred to herein as a passenger strand) and an antisense strand (also referred to herein as a guide strand). In some embodiments, the sense strand and antisense strand are separate strands and are not covalently linked. In some embodiments, the sense strand and antisense strand are covalently linked. In some embodiments, the sense strand and antisense strand form a duplex region, wherein the sense strand and antisense strand, or a portion thereof, binds or anneals to one another in a complementary manner (e.g., by Watson-Crick base pairing).

[0338] In some embodiments, the sense strand has a first region (R1) and a second region (R2), wherein R2 comprises a first subregion (S1), a loop (L), such as a tetraloop (tetraL) or triloop (triL), and a second subregion (S2), wherein L or triL is located between S1 and S2, and wherein S1 and S2 form a second duplex (D2). D2 may have various lengths. In some embodiments, D2 is about 1-6 bp in length. In some embodiments, D2 is 2-6, 3-6, 4-6, 5-6, 1-5, 2-5, 3-5 or 4-5 bp in length. In some embodiments, D2 is 1, 2, 3, 4, 5 or 6 bp in length. In some embodiments, D2 is 6 bp in length.

[0339] In some embodiments, R1 of the sense strand and the antisense strand form a first duplex (D1). In some embodiments, D1 is at least about 15 (e.g., at least 15, at least 16, at least 17, at least 18, at least 19, at least 20 or at least 21) nucleotides in length. In some embodiments, D1 is in the range of about 12 to 30 nucleotides in length (e.g., 12 to 30, 12 to 27, 15 to 22, 18 to 22, 18 to 25, 18 to 27, 18 to 30 or 21 to 30 nucleotides in length). In some embodiments, D1 is at least 12 nucleotides in length (e.g., at least 12, at least 15, at least 20, at least 25, or at least 30 nucleotides in length). In some embodiments, D1 is 12, 13, 14, 15, 16, 17, 18, 19, 20, 21, 22, 23, 24, 25, 26, 27, 28, 29 or 30 nucleotides in length. In some embodiments, D1 is 19 nucleotides in length. In some embodiments, D1 is 20 nucleotides in length. In some embodiments, D1 comprising the sense strand and antisense strand does not span the entire length of the sense strand and/or antisense strand. In some embodiments, D1 comprising the sense strand and antisense strand spans the entire length of either the sense strand or antisense strand or both. In certain embodiments, D1 comprising the sense strand and antisense strand spans the entire length of both the sense strand and the antisense strand.

[0340] It should be appreciated that, in some embodiments, sequences presented in the Sequence Listing may be referred to in describing the structure of an oligonucleotide (e.g., a oligonucleotide-ligand conjugate) or other nucleic acid. In such embodiments, the actual oligonucleotide or other nucleic acid may have one or more alternative nucleotides (e.g., an RNA counterpart of a DNA nucleotide or a DNA counterpart of an RNA nucleotide) and/or one or more modified nucleotides and/or one or more modified internucleotide linkages and/or one or more other modification when compared with the specified sequence while retaining essentially same or similar complementary properties as the specified sequence.

[0341] In some embodiments, an oligonucleotide-ligand conjugate herein comprises a 25-nucleotide sense strand and a 27-nucleotide antisense strand that when acted upon by a Dicer enzyme results in an antisense strand that is incorporated into the mature RISC. In some embodiments, the sense strand of the oligonucleotide-ligand conjugate is longer than 27 nucleotides (e.g., 28, 29, 30, 31, 32, 33, 34, 35, 36, 37, 38, 39, 40, 41, 42, 43, 44, 45, 46, 47, 48, 49 or 50 nucleotides). In some embodiments, the sense strand of the oligonucleotide-ligand conjugate is longer than 25 nucleotides (e.g., 26, 27, 28, 29 or 30 nucleotides).

[0342] In some embodiments, the oligonucleotide-ligand conjugates herein have one 5′ end that is thermodynamically less stable when compared to the other 5′ end. In some embodiments, an asymmetric oligonucleotide-ligand conjugate is provided that comprises a blunt end at the 3′ end of a sense strand and a 3′-overhang at the 3′ end of an antisense strand. In some embodiments, the 3′-overhang on the antisense strand is about 1-8 nucleotides in length (e.g., 1, 2, 3, 4, 5, 6, 7 or 8 nucleotides in length). Typically, an oligonucleotide-ligand conjugate has a two-nucleotide overhang on the 3′ end of the antisense (guide) strand. However, other overhangs are possible. In some embodiments, an overhang is a 3′-overhang comprising a length of between 1 and 6 nucleotides, optionally 1 to 5, 1 to 4, 1 to 3, 1 to 2, 2 to 6, 2 to 5, 2 to 4, 2 to 3, 3 to 6, 3 to 5, 3 to 4, 4 to 6, 4 to 5, 5 to 6 nucleotides, or 1, 2, 3, 4, 5 or 6 nucleotides. However, in some embodiments, the overhang is a 5′-overhang comprising a length of between 1 and 6 nucleotides, optionally 1 to 5, 1 to 4, 1 to 3, 1 to 2, 2 to 6, 2 to 5, 2 to 4, 2 to 3, 3 to 6, 3 to 5, 3 to 4, 4 to 6, 4 to 5, 5 to 6 nucleotides, or 1, 2, 3, 4, 5 or 6 nucleotides.

[0343] In some embodiments, two terminal nucleotides on the 3′ end of an antisense strand are modified. In some embodiments, the two terminal nucleotides on the 3′ end of the antisense strand are complementary with the target mRNA (e.g., a target mRNA regulating immune suppression). In some embodiments, the two terminal nucleotides on the 3′ end of the antisense strand are not complementary with the target mRNA. In some embodiments, the two terminal nucleotides on the 3′ end of the antisense strand of an oligonucleotide-ligand conjugate herein are unpaired. In some embodiments, the two terminal nucleotides on the 3′ end of the antisense strand of an oligonucleotide-ligand conjugate herein comprise an unpaired GG. In some embodiments, the two terminal nucleotides on the 3′ end of the antisense strand of an oligonucleotide-ligand conjugate herein are not complementary to the target mRNA. In some embodiments, two terminal nucleotides on each 3′ end of an oligonucleotide-ligand conjugate are GG. Typically, one or both of the two terminal GG nucleotides on each 3′ end of a double-stranded oligonucleotide (e.g., an RNAi oligonucleotide conjugate) is not complementary with the target mRNA.

[0344] In some embodiments, there is one or more (e.g., 1, 2, 3, 4 or 5) mismatch(s) between a sense and antisense strand. If there is more than one mismatch between a sense and antisense strand, they may be positioned consecutively (e.g., 2, 3 or more in a row), or interspersed throughout the region of complementarity. In some embodiments, the 3′ end of the sense strand contains one or more mismatches. In one embodiment, two mismatches are incorporated at the 3′ end of the sense strand. In some embodiments, base mismatches, or destabilization of segments at the 3′ end of the sense strand of an oligonucleotide-ligand conjugate herein improves or increases the potency and/or efficacy of the oligonucleotide-ligand conjugate.

[0345] In some embodiments, the targeting ligand is a GalNAc as described herein. In some embodiments, the targeting ligand is a carbohydrate. In some embodiments, the targeting ligand is an amino sugar.

[0346] In some embodiments, the oligonucleotide-ligand conjugate comprises two or more targeting ligands, wherein the targeting ligands are different. In some embodiments, the oligonucleotide-ligand conjugate comprises two or more targeting ligands, wherein the targeting ligands are the same.

### Exemplary Oligonucleotides

[0347] In some embodiments, the oligonucleotide-ligand conjugate comprises an oligonucleotide conjugated with a fatty acid. In some embodiments, the fatty acid is a saturated fatty acid. In some embodiments, the fatty acid is an unsaturated fatty acid. In some embodiments, the oligonucleotide is conjugated with a lipid. In some embodiments, the lipid is a carbon chain. In some embodiments, the carbon chain is saturated. In some embodiments, the carbon chain is unsaturated. In some embodiments, the oligonucleotide is conjugated with a 16-carbon (C16) lipid. In some embodiments, the C16 lipid comprises at least one double bond. In some embodiments, the oligonucleotide is conjugated with an 18-carbon (C18) lipid. In some embodiments, the C18 lipid comprises at least one double bond. In some embodiments, the oligonucleotide is conjugated with a 22-carbon (C22) lipid. In some embodiments, the C22 lipid comprises at least one double bond. In some embodiments, the oligonucleotide is conjugated with a 24-carbon (C24) lipid. In some embodiments, the C24 lipid comprises at least one double bond.

[0348] In some embodiments, the oligonucleotide of the oligonucleotide-ligand conjugate comprises a loop wherein at least one nucleotide of the loop is conjugated with a C16 lipid. In some embodiments, the second nucleotide of the loop is conjugated with a C16 lipid. In some embodiments, the oligonucleotide of the oligonucleotide-ligand conjugate comprises a loop wherein at least one nucleotide of the loop is conjugated with a C18 lipid. In some embodiments, the second nucleotide of the loop is conjugated with a C18 lipid. In some embodiments, the oligonucleotide of the oligonucleotide-ligand conjugate comprises a loop wherein at least one nucleotide of the loop is conjugated with a C22 lipid. In some embodiments, the second nucleotide of the loop is conjugated with a C22 lipid. In some embodiments, the oligonucleotide of the oligonucleotide-ligand conjugate comprises a loop wherein at least one nucleotide of the loop is conjugated with a C24 lipid. In some embodiments, the second nucleotide of the loop is conjugated with a C24 lipid.

[0349] In some embodiments, the oligonucleotide of the oligonucleotide-ligand conjugate comprises a tetraloop wherein at least one nucleotide of the tetraloop is conjugated with a C16 lipid. In some embodiments, the second nucleotide of the tetraloop is conjugated with a C16 lipid. In some embodiments, the oligonucleotide of the oligonucleotide-ligand conjugate comprises a tetraloop wherein at least one nucleotide of the tetraloop is conjugated with a C18 lipid. In some embodiments, the second nucleotide of the tetraloop is conjugated with a C18 lipid. In some embodiments, the oligonucleotide of the oligonucleotide-ligand conjugate comprises a tetraloop wherein at least one nucleotide of the tetraloop is conjugated with a C22 lipid. In some embodiments, the second nucleotide of the tetraloop is conjugated with a C22 lipid. In some embodiments, the oligonucleotide of the oligonucleotide-ligand conjugate comprises a tetraloop wherein at least one nucleotide of the tetraloop is conjugated with a C24 lipid. In some embodiments, the second nucleotide of the tetraloop is conjugated with a C24 lipid.

[0350] In some embodiments, an oligonucleotide-ligand conjugate comprises a nucleotide sequence having at least one modified nucleoside. In some embodiments, an oligonucleotide-ligand conjugate comprises an antisense strand and a sense strand, wherein each strand comprises at least one modified nucleoside.

[0351] In some embodiments, the oligonucleotide-ligand conjugate is represented by the following formula:

### Sense Strand:

[0352] [mXs][mX][mX][mX][mX][mX][mX][fX][fX][fX][fX][mX][mX][mX][mX][mX][mX][mX][mX][mX][mX][mX][mX][mX][mX][mX][mX][ademX-TL][mX][mX][mX][mX][mX][mX][mX][mX]
[0353] Hybridized to
[0354] Antisense Strand: [MePhosphonate-4O-mXs][fXs][fX][fX][fX][mX][fX][mX][mX][fX][mX][mX][mX][fX][mX][mX][mX][mX][mX][mXs][mXs][mX]
[0355] Or
[0356] Sense Strand:
[0357] [mXs][mX][mX][mX][mX][mX][mX][fX][fX][fX][fX][mX][mX][mX][mX][mX][mX][mX][mX][mX][mX][mX][mX][mX][mX][mX][mX][ademX-C #][mX][mX][mX][mX][mX][mX][mX][mX]
[0358] Hybridized to
[0359] Antisense Strand: [MePhosphonate-4O-mXs][fXs][fX][fX][fX][mX][fX][mX][mX][fX][mX][mX][mX][fX][mX][mX][mX][mX][mX][mXs][mXs][mX]

[0360] In some embodiments, the oligonucleotide-ligand conjugate is represented by the following formula:
[0361] Sense Strand:
[0362] [mXs][mX][mX][mX][mX][mX][mX][fX][fX][fX][fX][mX][mX][mX][mX][mX][mX][mX][mX][mX][mX][mX][mX][mX][mX][mX][mX][ademX-TL][mX][mX][mX][mX][mX][mX][mX][mX]
[0363] Hybridized to
[0364] Antisense Strand: [MePhosphonate-4O-mXs][fXs][fXs][fX][fX][mX][fX][mX][mX][fX][mX][mX][mX][fX][mX][mX][mX][mX][mX][mXs][mXs][mX]
[0365] Or
[0366] Sense Strand:
[0367] [mXs][mX][mX][mX][mX][mX][mX][fX][fX][fX][fX][mX][mX][mX][mX][mX][mX][mX][mX][mX][mX][mX][mX][mX][mX][mX][mX][ademX-C#][mX][mX][mX][mX][mX][mX][mX][mX]
[0368] Hybridized to
[0369] Antisense Strand: [MePhosphonate-4O-mXs][fXs][fXs][fX][fX][mX][fX][mX][mX][fX][mX][mX][mX][fX][mX][mX][mX][mX][mX][mXs][mXs][mX]

TABLE 1
Modification Key

| | |
|---|---|
| [MePhosphonate-4O-mX] | 4′-O-monomethylphosphonate-2′-O-methyl |
| | modified nucleotide |
| ademX-TL | 2′-aminodiethoxymethanol-nucleotide-targeting |
| | ligand |
| | (i.e., a targeting ligand attached to a nucleotide) |
| ademX-C# | 2′-aminodiethoxymethanol-nucleotide- |
| | hydrocarbon chain (e.g., a C16 or C18 lipid |
| | conjugate attached to a nucleotide) |
| [mXs] | 2′-O-methyl modified nucleotide with a |
| | phosphorothioate linkage to the neighboring |
| | nucleotide |
| [fXs] | 2'-fluoro modified nucleotide with a |
| | phosphorothioate linkage to the neighboring |
| | nucleotide |
| [mX] | 2′-O-methyl modified nucleotide with |
| | phosphodiester linkages to neighboring |
| | nucleotides |
| [fX] | 2′-fluoro modified nucleotide with |
| | phosphodiester linkages to neighboring |
| | nucleotides |

[0370] In some embodiments, the oligonucleotide of the oligonucleotide-ligand conjugate is conjugated to a C16 lipid as shown in:

[chemical structure]

[0371] In some embodiments, the oligonucleotide of the oligonucleotide-ligand conjugate is conjugated to a C18 lipid as shown in:

[chemical structure]

[0372] In some embodiments, the oligonucleotide-ligand conjugate reduces target mRNA in immune cells of the TME or TdLN but does not reduce mRNA in tumor epithelial cells.

### Methods of Use

[0373] i. Reducing Target Gene Expression

[0374] In some embodiments, the disclosure provides methods for contacting or delivering to an immune cell or population of immune cells of a tumor microenvironment (e.g., tumor resident immune cells) an effective amount of any of the oligonucleotide-ligand conjugates herein to reduce target gene expression (e.g., reduce expression of a target gene encoding a regulator of immune suppression). In some embodiments, a reduction of target gene expression is determined by measuring a reduction in the amount or level of target mRNA, protein encoded by the target mRNA, or target gene (mRNA or protein) activity in a cell. The methods include those described herein and known to one of ordinary skill in the art.

[0375] Methods provided herein are useful in any appropriate tumor resident immune cell type. In some embodiments, a cell is any cell that expresses the target mRNA. In some embodiments, the cell is a primary cell obtained from a subject. In some embodiments, the primary cell has undergone a limited number of passages such that the cell substantially maintains is natural phenotypic properties. In some embodiments, a cell to which the oligonucleotide-ligand conjugate is delivered is ex vivo or in vitro (i.e., can be delivered to a cell in culture or to an organism in which the cell resides).

[0376] In some embodiments, the oligonucleotide-ligand conjugates disclosed herein are delivered to an immune cell or population of immune cells of a tumor microenvironment using a nucleic acid delivery method known in the art including, but not limited to, injection of a solution or pharmaceutical composition containing the oligonucleotide-ligand conjugate, bombardment by particles covered by the oligonucleotide-ligand conjugate, exposing the cell or population of cells to a solution containing the oligonucleotide-ligand conjugate, or electroporation of cell membranes in the presence of the oligonucleotide-ligand conjugate. Other methods known in the art for delivering oligonucleotides to cells may be used, such as lipid-mediated carrier transport, chemical-mediated transport, and cationic liposome transfection such as calcium phosphate, and others.

[0377] In some embodiments, reduction of target gene expression is determined by an assay or technique that evaluates one or more molecules, properties or characteristics of a cell or population of cells associated with target gene expression, or by an assay or technique that evaluates molecules that are directly indicative of target gene expression in a cell or population of cells (e.g., target mRNA or protein). In some embodiments, the extent to which an oligonucleotide-ligand conjugate provided herein reduces target gene expression (e.g., reduces expression of a target gene encoding a regulator of immune suppression) is evaluated by comparing target gene expression in a cell or population of cells contacted with the oligonucleotide-ligand conjugate to a control cell or population of cells (e.g., a cell or population of cells not contacted with the oligonucleotide-ligand conjugate or contacted with a control oligonucleotide-ligand conjugate). In some embodiments, a control amount or level of target gene expression in a control cell or population of cells is predetermined, such that the control amount or level need not be measured in every instance the assay or technique is performed. The predetermined level or value can take a variety of forms. In some embodiments, a predetermined level or value can be single cut-off value, such as a median or mean.

[0378] Measuring mRNA in the immune cells can be done using techniques known to those of skill in the art. For example, after a tumor is extracted, the tissue is manually or chemically dissociated into single cells. MACS sorting is then used to isolate the cells of interest (e.g. MDSCs) which are collected and prepared for RNA analysis. In some embodiments, the oligonucleotide conjugate reduces target mRNA expression in immune cells of the TME or TdLN for one day to at least 4 weeks. In some embodiments, the oligonucleotide-ligand conjugate reduces target mRNA expression in immune cells of the TME or TdLN for one day, three days, 7 days, 14 days, 21 days, 28 days, or 34 days. In some embodiments, the oligonucleotide-ligand conjugate reduces target mRNA expression in immune cells of the TME or TdLN for at least 1-4 weeks. In some embodiments, the oligonucleotide-ligand conjugate reduces target mRNA expression in immune cells of the TME or TdLN for up to 2 weeks. In some embodiments, the oligonucleotide-ligand conjugate reduces target mRNA expression in immune cells of the TME or TdLN for up to 4 weeks.

[0379] In some embodiments, the oligonucleotide-ligand conjugate reduces target mRNA expression in M-MDSCs for one day to at least 4 weeks. In some embodiments, the oligonucleotide-ligand conjugate reduces target mRNA expression in M-MDSCs for one day, three days, 7 days, 14 days, 21 days, 28 days, or 34 days. In some embodiments, the oligonucleotide-ligand conjugate reduces target mRNA expression in in M-MDSCs for at least 1-4 weeks. In some embodiments, the oligonucleotide-ligand conjugate reduces target mRNA expression in in M-MDSCs for up to 2 weeks. In some embodiments, the oligonucleotide-ligand conjugate reduces target mRNA expression in immune cells of the in M-MDSCs for up to 4 weeks.

[0380] In some embodiments, the oligonucleotide-ligand conjugate reduces target mRNA expression in G-MDSCs for one day to at least 4 weeks. In some embodiments, the oligonucleotide-ligand conjugate reduces target mRNA expression in G-MDSCs for one day, three days, 7 days, 14 days, 21 days, 28 days, or 34 days. In some embodiments, the oligonucleotide-ligand conjugate reduces target mRNA expression in in G-MDSCs for at least 1-4 weeks. In some embodiments, the oligonucleotide-ligand conjugate reduces target mRNA expression in in G-MDSCs for up to 2 weeks. In some embodiments, the oligonucleotide-ligand conjugate reduces target mRNA expression in immune cells of the in G-MDSCs for up to 4 weeks.

[0381] In some embodiments, the oligonucleotide-ligand conjugate reduces target mRNA expression in Tregs for one day to at least 4 weeks. In some embodiments, the oligonucleotide-ligand conjugate reduces target mRNA expression in Tregs for one day, three days, 7 days, 14 days, 21 days, 28 days, or 34 days. In some embodiments, the oligonucleotide-ligand conjugate reduces target mRNA expression in in M-MDSCs for at least 1-4 weeks. In some embodiments, the oligonucleotide-ligand conjugate reduces target mRNA expression in in Tregs for up to 2 weeks. In some embodiments, the oligonucleotide-ligand conjugate reduces target mRNA expression in immune cells of the in Tregs for up to 4 weeks.

[0382] In some embodiments, contacting or delivering an oligonucleotide-ligand conjugate described herein to an immune cell or a population of immune cells of a tumor microenvironment (e.g., a tumor resident immune cell) results in a reduction in target gene expression. In some embodiments, the reduction in target gene expression is relative to a control amount or level of target gene expression in a cell or population of cells not contacted with the oligonucleotide-ligand conjugate or contacted with a control oligonucleotide-ligand conjugate. In some embodiments, the reduction in target gene expression is about 1% or lower, about 5% or lower, about 10% or lower, about 15% or lower, about 20% or lower, about 25% or lower, about 30% or lower, about 35% or lower, about 40% or lower, about 45% or lower, about 50% or lower, about 55% or lower, about 60% or lower, about 70% or lower, about 80% or lower, or about 90% or lower relative to a control amount or level of target gene expression. In some embodiments, the reduction in target gene expression in an immune cell in the TME is about 1% or lower, about 5% or lower, about 10% or lower, about 15% or lower, about 20% or lower, about 25% or lower, about 30% or lower, about 35% or lower, about 40% or lower, about 45% or lower, about 50% or lower, about 55% or lower, about 60% or lower, about 70% or lower, about 80% or lower, or about 90% or lower relative to a control amount or level of target gene expression. In some embodiments, the reduction in target gene expression in an immune cell in the TdLN is about 1% or lower, about 5% or lower, about 10% or lower, about 15% or lower, about 20% or lower, about 25% or lower, about 30% or lower, about 35% or lower, about 40% or lower, about 45% or lower, about 50% or lower, about 55% or lower, about 60% or lower, about 70% or lower, about 80% or lower, or about 90% or lower relative to a control amount or level of target gene expression. In some embodiments, the reduction in target gene expression in an M-MDSC is about 1% or lower, about 5% or lower, about 10% or lower, about 15% or lower, about 20% or lower, about 25% or lower, about 30% or lower, about 35% or lower, about 40% or lower, about 45% or lower, about 50% or lower, about 55% or lower, about 60% or lower, about 70% or lower, about 80% or lower, or about 90% or lower relative to a control amount or level of target gene expression. In some embodiments, the reduction in target gene expression in an G-MDSC is about 1% or lower, about 5% or lower, about 10% or lower, about 15% or lower, about 20% or lower, about 25% or lower, about 30% or lower, about 35% or lower, about 40% or lower, about 45% or lower, about 50% or lower, about 55% or lower, about 60% or lower, about 70% or lower, about 80% or lower, or about 90% or lower relative to a control amount or level of target gene expression. In some embodiments, the reduction in target gene expression in an Treg is about 1% or lower, about 5% or lower, about 10% or lower, about 15% or lower, about 20% or lower, about 25% or lower, about 30% or lower, about 35% or lower, about 40% or lower, about 45% or lower, about 50% or lower, about 55% or lower, about 60% or lower, about 70% or lower, about 80% or lower, or about 90% or lower relative to a control amount or level of target gene expression. In some embodiments, the control amount or level of target gene expression is an amount or level of target mRNA and/or protein in a cell or population of cells that has not been contacted with an oligonucleotide-ligand conjugate herein. In some embodiments, the effect of delivery of an oligonucleotide-ligand conjugate to an immune cell or a population of immune cells of a tumor microenvironment (e.g., a tumor resident immune cell) according to a method herein is assessed after any finite period or amount of time (e.g., minutes, hours, days, weeks, months). For example, in some embodiments, target gene expression is determined in an immune cell or a population of immune cells of a tumor microenvironment (e.g., a tumor resident immune cell) at least about 4 hours, about 8 hours, about 12 hours, about 18 hours, about 24 hours; or at least about 1 day, about 2 days, about 3 days, about 4 days, about 5 days, about 6 days, about 7 days, about 8 days, about 9 days, about 10 days, about 11 days, about 12 days, about 13 days, about 14 days, about 21 days, about 28 days, about 35 days, about 42 days, about 49 days, about 56 days, about 63 days, about 70 days, about 77 days, or about 84 days or more after contacting or delivering the oligonucleotide-ligand conjugate to the cell or population of cells. In some embodiments, target gene expression is determined in an immune cell or a population of immune cells of a tumor microenvironment (e.g., a tumor resident immune cell) at least about 1 month, about 2 months, about 3 months, about 4 months, about 5 months, or about 6 months or more after contacting or delivering the oligonucleotide-ligand conjugate to the cell or population of cells.

[0383] Reducing the activity of immunosuppressive cells in a tumor, such as Tregs or MDSCs is a potential strategy to convert cold tumors into hot tumors. In some embodiments, the oligonucleotide-ligand conjugate converts a cold tumor into a hot tumor. In some embodiments, the oligonucleotide-ligand conjugate enhances anti-tumorigenic immune activity by reducing immunosuppressive activity. In some embodiments, the oligonucleotide-ligand conjugate enhances anti-tumorigenic T-cell activity by reducing the activity of immunosuppressive cells (e.g. MDSCs).

[0384] In some embodiments, the oligonucleotide-ligand conjugate enhances anti-tumorigenic activity by reducing the immunosuppressive activity of MDSCs. In some embodiments, the oligonucleotide-ligand conjugate enhances anti-tumorigenic activity by reducing the immunosuppressive activity of M-MDSCs. In some embodiments, the oligonucleotide-ligand conjugate enhances anti-tumorigenic activity by reducing the immunosuppressive activity of G-MDSCs. In some embodiments, the oligonucleotide-ligand conjugate enhances anti-tumorigenic activity by reducing the immunosuppressive activity of Tregs. In some embodiments, methods for measuring anti-tumorigenic activity include, but are not limited to, measuring the number of tumor infiltrating lymphocytes in the tumor.

[0385] In some embodiments, the oligonucleotide-ligand conjugate reduces the immunosuppressive activity of M-MDSCs to a sufficient amount to convert a cold tumor into a hot tumor. In some embodiments, the oligonucleotide-ligand conjugate reduces the immunosuppressive activity of G-MDSCs to a sufficient amount to convert a cold tumor into a hot tumor. In some embodiments, the oligonucleotide-ligand conjugate reduces the immunosuppressive activity of Tregs to a sufficient amount to convert a cold tumor into a hot tumor. Methods for determine whether a cold tumor has been converted to a hot tumor include, but are not limited to, measuring the response of the tumor to an immunotherapy (e.g., checkpoint inhibitor polypeptide).

[0386] ii. Treatment Methods and Medical Use

[0387] In some aspects, the disclosure provides oligonucleotide-ligand conjugates for use, or adaptable for use, to treat a subject (e.g., a human) with cancer that would benefit from reducing a target gene (e.g., a target gene encoding a regulator of immune suppression). In some respects, the disclosure provides oligonucleotide-ligand conjugates for use, or adapted for use, to treat a subject having cancer. In some respects, the disclosure provides oligonucleotide-ligand conjugates for use, or adapted for use, to treat a subject having cancer associated with an immunosuppressive TME. The disclosure also provides oligonucleotide-ligand conjugates for use, or adaptable for use, in the manufacture of a medicament or pharmaceutical composition for treating cancer. In some embodiments, the oligonucleotide-ligand conjugates for use, or adaptable for use, target a regulator of immune suppression (e.g., a transcription factor or checkpoint inhibitor polypeptide). In some embodiments, the oligonucleotide-ligand conjugates for use, or adaptable for use, target a regulator of immune suppression and reduce the amount or level of the regulator's mRNA, or the regulator's protein and/or activity.

[0388] As detailed below, the methods also may include steps such as measuring or obtaining a baseline value for a marker of a regulator of immune suppression, and then comparing such obtained value to one or more other baseline values or values obtained after being administered the oligonucleotide to assess the effectiveness of treatment.

[0389] In some embodiments, the disclosure provides oligonucleotide-ligand conjugates for reducing immune suppression in a tumor microenvironment. In some embodiments, reduction of immune suppression is determined by an appropriate assay or technique to evaluate one or more properties or characteristics of immune suppression in a tumor (e.g. the presence of suppressive cells such as MDSCs) or by an assay or technique that evaluates molecules that are directly indicative of immune suppression (e.g., high Arg1 expression). In some embodiments, the extent to which an oligonucleotide-ligand conjugate herein reduces immune suppression is evaluated by comparing immune suppression in the TME contacted with the oligonucleotide-ligand conjugate to an appropriate control (e.g., an appropriate tumor not contacted with the oligonucleotide or contacted with a control oligonucleotide). In some embodiments, an appropriate control level of mRNA expression into protein may be a predetermined level or value, such that a control level need not be measured every time. The predetermined level or value can take a variety of forms. In some embodiments, a predetermined level or value can be single cut-off value, such as a median or mean.

[0390] In some embodiments, administration of an oligonucleotide-ligand conjugate herein results in a reduction in target mRNA in a tumor resident immune cell. In some embodiments, the reduction in target mRNA is about 1% or lower, about 5% or lower, about 10% or lower, about 15% or lower, about 20% or lower, about 25% or lower, about 30% or lower, about 35% or lower, about 40% or lower, about 45% or lower, about 50% or lower, about 55% or lower, about 60% or lower, about 70% or lower, about 80% or lower, or about 90% or lower when compared with an appropriate control level of mRNA. The appropriate control level may be a level of mRNA expression and/or protein translation in a cell or population of cells that has not been contacted with an oligonucleotide-ligand conjugate herein. In some embodiments, the effect of delivery of an oligonucleotide-ligand conjugate to a cell according to a method herein is assessed after a finite period. For example, levels of mRNA may be analyzed in a cell at least about 8 hours, about 12 hours, about 18 hours, about 24 hours; or at least about 1, 2, 3, 4, 5, 6, 7 or even up to 14 days after introduction of the oligonucleotide-ligand conjugate into the tumor.

[0391] In some embodiments, an oligonucleotide-ligand conjugate is delivered in the form of a transgene that is engineered to express in a cell the oligonucleotide-ligand conjugate or strands comprising the oligonucleotide-ligand conjugate (e.g., its sense and antisense strands). In some embodiments, an o oligonucleotide-ligand conjugate is delivered using a transgene engineered to express any oligonucleotide-ligand conjugate disclosed herein. Transgenes may be delivered using viral vectors (e.g., adenovirus, retrovirus, vaccinia virus, poxvirus, adeno-associated virus, or herpes simplex virus) or non-viral vectors (e.g., plasmids or synthetic mRNAs). In some embodiments, transgenes can be injected directly to a subject.

[0392] In some aspects, the disclosure provides methods of treating a subject having, suspected of having, or at risk of developing a cancer. In some embodiments, the disclosure provides methods of treating or attenuating the onset or progression of cancer using the oligonucleotide-ligand conjugates described herein. In some embodiments of the methods herein, a subject is treated by administering a therapeutically effective amount of any one or more of the oligonucleotide-ligand conjugates herein. In some embodiments, the subject is a mammal. In some embodiments, the subject is a human.

[0393] In some embodiments of the methods herein, one or more oligonucleotide-ligand conjugates herein, or a pharmaceutical composition comprising one or more oligonucleotide-ligand conjugates, is administered to a subject having cancer. In some embodiments, the oligonucleotide-ligand conjugate reduces a target mRNA in a tumor (e.g., in an immune cell in a tumor microenvironment). In some embodiments, the amount of target mRNA and/or protein is reduced in the subject.

[0394] In some embodiments of the methods herein, an oligonucleotide-ligand conjugate herein, or a pharmaceutical composition comprising the oligonucleotide-ligand conjugate, is administered to a subject having cancer and expression of a target gene (e.g., regulator of immune suppression) is reduced in the subject by at least about 30%, about 35%, about 40%, about 45%, about 50%, about 55%, about 60%, about 65%, about 70%, about 75%, about 80%, about 85%, about 90%, about 95%, about 99% or greater than 99% when compared to expression of the target prior to administration of one or more oligonucleotide-ligand conjugates or pharmaceutical composition. In some embodiments, the target mRNA is reduced in the subject by at least about 30%, about 35%, about 40%, about 45%, about 50%, about 55%, about 60%, about 65%, about 70%, about 75%, about 80%, about 85%, about 90%, about 95%, about 99% or greater than 99% when compared to the target mRNA expression in a subject (e.g., a reference or control subject) not receiving the oligonucleotide-ligand conjugate or pharmaceutical composition or receiving a control oligonucleotide-ligand conjugate or pharmaceutical composition or treatment.

[0395] In some embodiments of the methods herein, an oligonucleotide-ligand conjugate or oligonucleotide-ligand conjugates herein, or a pharmaceutical composition comprising the oligonucleotide-ligand conjugate (s), is administered to a subject having cancer such that an amount or level of target mRNA (e.g., gene encoding a regulator of immune suppression) is reduced in tumor resident immune cells of the subject by at least about 30%, about 35%, about 40%, about 45%, about 50%, about 55%, about 60%, about 65%, about 70%, about 75%, about 80%, about 85%, about 90%, about 95%, about 99% or greater than 99% when compared to the amount or level of target mRNA prior to administration of the oligonucleotide-ligand conjugate or pharmaceutical composition. In some embodiments of the methods herein, an oligonucleotide-ligand conjugate or oligonucleotide-ligand conjugates herein, or a pharmaceutical composition comprising the oligonucleotide-ligand conjugate (s), is administered to a subject having cancer such that an amount or level of target mRNA (e.g., gene encoding a regulator of immune suppression) is reduced in TdLN immune cells of the subject by at least about 30%, about 35%, about 40%, about 45%, about 50%, about 55%, about 60%, about 65%, about 70%, about 75%, about 80%, about 85%, about 90%, about 95%, about 99% or greater than 99% when compared to the amount or level of target mRNA prior to administration of the oligonucleotide-ligand conjugate or pharmaceutical composition. In some embodiments, an amount or level of target mRNA is reduced in the subject by at least about 30%, about 35%, about 40%, about 45%, about 50%, about 55%, about 60%, about 65%, about 70%, about 75%, about 80%, about 85%, about 90%, about 95%, about 99% or greater than 99% when compared to an amount or level of target mRNA in a subject (e.g., a reference or control subject) not receiving the oligonucleotide-ligand conjugate or oligonucleotide-ligand conjugates or pharmaceutical composition or receiving a control oligonucleotide-ligand conjugate or oligonucleotide-ligand conjugates, pharmaceutical composition or treatment.

[0396] In some embodiments of the methods herein, an oligonucleotide-ligand conjugate or oligonucleotide-ligand conjugates herein, or a pharmaceutical composition comprising the oligonucleotide-ligand conjugate(s), is administered to a subject having cancer with an immune suppressive environment such that an amount or level of a target protein regulating immune suppression is reduced in the subject by at least about 30%, about 35%, about 40%, about 45%, about 50%, about 55%, about 60%, about 65%, about 70%, about 75%, about 80%, about 85%, about 90%, about 95%, about 99% or greater than 99% when compared to the amount or level of protein regulating immune suppression prior to administration of the oligonucleotide-ligand conjugate or pharmaceutical composition. In some embodiments, an amount or level of protein regulating immune suppression is reduced in the subject by at least about 30%, about 35%, about 40%, about 45%, about 50%, about 55%, about 60%, about 65%, about 70%, about 75%, about 80%, about 85%, about 90%, about 95%, about 99% or greater than 99% when compared to an amount or level of protein regulating immune suppression in a subject (e.g., a reference or control subject) not receiving the oligonucleotide-ligand conjugate(s) or pharmaceutical composition or receiving a control oligonucleotide-ligand conjugate(s), or pharmaceutical composition or treatment.

[0397] In some embodiments of the methods herein, an oligonucleotide-ligand conjugate or oligonucleotide-ligand conjugates herein, or a pharmaceutical composition comprising the oligonucleotide-ligand conjugate or oligonucleotide-ligand conjugates, is administered to a subject having cancer with an immunosuppressive TME such that an amount or level of an mRNA or protein regulating immune suppression is reduced in the subject by at least about 30%, about 35%, about 40%, about 45%, about 50%, about 55%, about 60%, about 65%, about 70%, about 75%, about 80%, about 85%, about 90%, about 95%, about 99% or greater than 99% when compared to the amount or level of the mRNA or protein regulating immune suppression prior to administration of the oligonucleotide-ligand conjugate or pharmaceutical composition. In some embodiments, an amount or level of target mRNA regulating immune suppression is reduced in the subject by at least about 30%, about 35%, about 40%, about 45%, about 50%, about 55%, about 60%, about 65%, about 70%, about 75%, about 80%, about 85%, about 90%, about 95%, about 99% or greater than 99% when compared to an amount or level of target mRNA in a subject (e.g., a reference or control subject) not receiving the oligonucleotide-ligand conjugate or pharmaceutical composition or receiving a control oligonucleotide-ligand conjugate, pharmaceutical composition or treatment.

[0398] Because of their high specificity, the oligonucleotide-ligand conjugates herein specifically target mRNAs of target genes of diseased cells and tissues. In some embodiments, the oligonucleotide-ligand conjugate delivers the oligonucleotide to a target cell. In some embodiments, the target cell is an immune cell found in a tumor microenvironment. In some embodiments, the target cell is an immune cell found in an immune suppressive tumor microenvironment. In some embodiments, the oligonucleotide-ligand conjugate delivers the oligonucleotide to one or more MDSC cell populations. In some embodiments, the oligonucleotide-ligand conjugate delivers the oligonucleotide to a G-MDSC. In some embodiments, the oligonucleotide-ligand conjugate delivers the oligonucleotide to a M-MDSC. In some embodiments, the oligonucleotide-ligand conjugate delivers the oligonucleotide to a G-MDSC and a M-MDSC. In some embodiments, the oligonucleotide-ligand conjugate delivers the oligonucleotide to a T cell in a tumor microenvironment. In some embodiments, the oligonucleotide-ligand conjugate delivers the oligonucleotide nucleotide to a Treg cell.

[0399] As described herein, the oligonucleotide-ligand conjugate for targeting an mRNA encoding a regulator of immune suppression is capable of converting a cold tumor to a hot tumor. Hot tumors enable other therapeutic approaches to be more effective at treating disease. Therefore, in some embodiments, an oligonucleotide-ligand conjugate described herein is administered in combination with a second therapeutic agent. In some embodiments, the second therapeutic agent is selected from, but not limited to a chemotherapy, a targeted anti-cancer therapy, an oncolytic drug, a cytotoxic agent, an immune-based therapy, a cytokine, surgical procedure, a radiation procedure, an activator of a costimulatory molecule, an inhibitor of an inhibitory molecule, a vaccine, or a cellular immunotherapy, or a combination thereof.

[0400] Methods described herein typically involve administering to a subject in an effective amount of an oligonucleotide-ligand conjugate or oligonucleotide-ligand conjugates, that is, an amount capable of producing a desirable therapeutic result. A therapeutically acceptable amount may be an amount that can therapeutically treat a disease or disorder. The appropriate dosage for any one subject will depend on certain factors, including the subject's size, body surface area, age, the particular composition to be administered, the active ingredient(s) in the composition, time and route of administration, general health, and other drugs being administered concurrently.

[0401] In some embodiments, a subject is administered any one of the compositions herein either enterally (e.g., orally, by gastric feeding tube, by duodenal feeding tube, via gastrostomy or rectally), parenterally (e.g., subcutaneous injection, intravenous injection or infusion, intra-arterial injection or infusion, intraosseous infusion, intramuscular injection, intracerebral injection, intracerebroventricular injection, intrathecal), topically (e.g., epicutaneous, inhalational, via eye drops, or through a mucous membrane), or by direct injection into a target organ (e.g., the liver of a subject). In some embodiments, an oligonucleotide-ligand conjugate or pharmaceutical composition thereof is administered intravenously or subcutaneously.

[0402] As a non-limiting set of examples, in some embodiments, the oligonucleotide-ligand conjugates herein are administered quarterly (once every three months), bi-monthly (once every two months), monthly or weekly. For example, the oligonucleotide-ligand conjugates may be administered every week or at intervals of two, or three weeks. Alternatively, the oligonucleotide-ligand conjugates may be administered daily. In some embodiments, a subject is administered one or more loading doses of the oligonucleotide-ligand conjugate followed by one or more maintenance doses of the oligonucleotide-ligand conjugate.

[0403] In some embodiments the oligonucleotide-ligand conjugate herein are administered alone or in combination. In some embodiments the oligonucleotides herein are administered in combination concurrently, sequentially (in any order), or intermittently. For example, two oligonucleotide-ligand conjugates may be co-administered concurrently. Alternatively, one oligonucleotide-ligand conjugate may be administered and followed any amount of time later (e.g., one hour, one day, one week or one month) by the administration of a second oligonucleotide-ligand conjugate.

[0404] In some embodiments, the subject to be treated is a human or non-human primate or other mammalian subject. Other exemplary subjects include domesticated animals such as dogs and cats; livestock such as horses, cattle, pigs, sheep, goats, and chickens; and animals such as mice, rats, guinea pigs, and hamsters.

### Types of Oligonucleotides

[0405] A variety of oligonucleotide types and/or structures are useful for targeting a target sequence in the methods herein including, but not limited to, RNAi oligonucleotides, antisense oligonucleotides, miRNAs, etc. Any of the oligonucleotide types described herein or elsewhere are contemplated for use as a framework to incorporate a targeting sequence herein.

[0406] In some embodiments, the oligonucleotides herein inhibit expression of a target sequence by engaging with RNA interference (RNAi) pathways upstream or downstream of Dicer involvement. For example, RNAi oligonucleotides have been developed with each strand having sizes of about 19-25 nucleotides with at least one 3′ overhang of 1 to 5 nucleotides (see, e.g., U.S. Pat. No. 8,372,968). Longer oligonucleotides also have been developed that are processed by Dicer to generate active RNAi products (see, e.g., U.S. Pat. No. 8,883,996). Further work produced extended dsRNAs where at least one end of at least one strand is extended beyond a duplex targeting region, including structures where one of the strands includes a thermodynamically-stabilizing tetraloop structure (see, e.g., U.S. Pat. Nos. 8,513,207 and 8,927,705, as well as Intl. Patent Application Publication No. WO 2010/033225). Such structures may include ss extensions (on one or both sides of the molecule) as well as ds extensions.

[0407] In some embodiments, the oligonucleotides herein engage with the RNAi pathway downstream of the involvement of Dicer (e.g., Dicer cleavage). In some embodiments, the oligonucleotides described herein are Dicer substrates. In some embodiments, upon endogenous Dicer processing, double-stranded nucleic acids of 19-23 nucleotide sin length capable of reducing target mRNA expression are produced. In some embodiments, the oligonucleotide has an overhang (e.g., of 1, 2, or 3 nucleotides in length) in the 3′ end of the sense strand. In some embodiments, the oligonucleotide (e.g., siRNA) comprises a 21-nucleotide guide strand that is antisense to a target RNA and a complementary passenger strand, in which both strands anneal to form a 19-bp duplex and 2 nucleotide overhangs at either or both 3′ ends. Longer oligonucleotide designs also are available including oligonucleotides having a guide strand of 23 nucleotides and a passenger strand of 21 nucleotides, where there is a blunt end on the right side of the molecule (3′ end of passenger strand/5′ end of guide strand) and a two nucleotide 3′-guide strand overhang on the left side of the molecule (5′ end of the passenger strand/3′ end of the guide strand). In such molecules, there is a 21 bp duplex region. See, e.g., U.S. Pat. Nos. 9,012,138; 9,012,621 and 9,193,753.

[0408] In some embodiments, the oligonucleotides herein comprise sense and antisense strands that are both in the range of about 17 to 26 (e.g., 17 to 26, 20 to 25 or 21-23) nucleotides in length. In some embodiments, the oligonucleotides herein comprise sense and antisense strands that are both in the range of about 17 to 36 (e.g., 17 to 36, 20 to 25 or 21-23) nucleotides in length. In some embodiments, the oligonucleotides described herein comprise an antisense strand of 19-30 nucleotides in length and a sense strand of 19-50 nucleotides in length, wherein the antisense and sense strands are separate strands which form an asymmetric duplex region having an overhand of 1-4 nucleotides at the 3′ terminus of the antisense strand. In some embodiments, an oligonucleotide herein comprises a sense and antisense strand that are both in the range of about 19-22 nucleotides in length. In some embodiments, the sense and antisense strands are of equal length. In some embodiments, an oligonucleotide comprises sense and antisense strands, such that there is a 3′-overhang on either the sense strand or the antisense strand, or both the sense and antisense strand. In some embodiments, for oligonucleotides that have sense and antisense strands that are both in the range of about 21-23 nucleotides in length, a 3′ overhang on the sense, antisense, or both sense and antisense strands is 1 or 2 nucleotides in length. In some embodiments, the oligonucleotide has a guide strand of 22 nucleotides and a passenger strand of 20 nucleotides, where there is a blunt end on the right side of the molecule (3′ end of passenger strand/5′ end of guide strand) and a 2 nucleotide 3′-guide strand overhang on the left side of the molecule (5′ end of the passenger strand/3′ end of the guide strand). In such molecules, there is a 20 bp duplex region.

[0409] Other oligonucleotide designs for use with the compositions and methods herein include: 16-mer siRNAs (see, e.g., NUCLEIC ACIDS IN CHEMISTRY AND BIOLOGY. Blackburn (ed.), Royal Society of Chemistry, 2006), shRNAs (e.g., having 19 bp or shorter stems; (see, e.g., Moore et al., (2010) METHODS MOL. BIOL. 629:141-58), blunt siRNAs (e.g., of 19 bps in length; see, e.g., Kraynack and Baker (2006) RNA 12:163-76), asymmetrical siRNAs (aiRNA; see, e.g., Sun et al., (2008) NAT. BIOTECHNOL. 26:1379-82), asymmetric shorter-duplex siRNA (see, e.g., Chang et al., (2009) MOL. THER. 17:725-32), fork siRNAs (see, e.g., Hohj oh (2004) FEBS LETT. 557:193-98), ss siRNAs (Elsner (2012) NAT. BIOTECHNOL. 30:1063), dumbbell-shaped circular siRNAs (see, e.g., Abe et al., (2007) J. AM. CHEM. SOC. 129:15108-09), and small internally segmented interfering RNA (siRNA; see, e.g., Bramsen et al., (2007) NUCLEIC ACIDS RES. 35:5886-97). Further non-limiting examples of an oligonucleotide structures that may be used in some embodiments to reduce or inhibit the expression of STAT3 are microRNA (miRNA), short hairpin RNA (shRNA) and short siRNA (see, e.g., Hamilton et al., (2002) EMBO J. 21:4671-79; see also, US Patent Application Publication No. 2009/0099115).

[0410] Still, in some embodiments, an oligonucleotide for reducing or inhibiting expression of a target sequence herein is ss. Such structures may include but are not limited to ss RNAi molecules. Recent efforts have demonstrated the activity of ss RNAi molecules (see, e.g., Matsui et al., (2016) MOL. THER. 24:946-55). However, in some embodiments, oligonucleotides herein are antisense oligonucleotides (ASOs). An antisense oligonucleotide is a ss oligonucleotide that has a nucleobase sequence which, when written in the 5′ to 3′ direction, comprises the reverse complement of a targeted segment of a particular nucleic acid and is suitably modified (e.g., as a gapmer) to induce RNaseH-mediated cleavage of its target RNA in cells or (e.g., as a mixmer) to inhibit translation of the target mRNA in cells. ASOs for use herein may be modified in any suitable manner known in the art including, for example, as shown in U.S. Pat. No. 9,567,587 (including, e.g., length, sugar moieties of the nucleobase (pyrimidine, purine), and alterations of the heterocyclic portion of the nucleobase). Further, ASOs have been used for decades to reduce expression of specific target genes (see, e.g., Bennett et al., (2017) ANNU. REV. PHARMACOL. 57:81-105).

[0411] In some embodiments, the antisense oligonucleotide shares a region of complementarity with a target mRNA. In some embodiments, the antisense oligonucleotide is 15-50 nucleotides in length. In some embodiments, the antisense oligonucleotide is 15-25 nucleotides in length. In some embodiments, the antisense oligonucleotide is 22 nucleotides in length. In some embodiments, the antisense oligonucleotide is at least 15 contiguous nucleotides in length. In some embodiments, the antisense oligonucleotide is at least 19 contiguous nucleotides in length. In some embodiments, the antisense oligonucleotide is at least 20 contiguous nucleotides in length. In some embodiments, the antisense oligonucleotide differs by 1, 2, or 3 nucleotides from the target sequence.

### Double-Stranded Oligonucleotides

[0412] In some embodiments, the disclosure provides double-stranded dsRNAs for targeting and inhibiting expression of a target sequence (e.g., via the RNAi pathway) comprising a sense strand (also referred to herein as a passenger strand) and an antisense strand (also referred to herein as a guide strand). In some embodiments, the sense strand and antisense strand are separate strands and are not covalently linked. In some embodiments, the sense strand and antisense strand are covalently linked. In some embodiments, the sense strand and antisense strand form a duplex region, wherein the sense strand and antisense strand, or a portion thereof, binds with one another in a complementary fashion (e.g., by Watson-Crick base pairing).

[0413] In some embodiments, the sense strand has a first region (R1) and a second region (R2), wherein R2 comprises a first subregion (S1), a loop (L), such as a tetraloop (tetraL) or triloop (triL), and a second subregion (S2), wherein L, tetraL, or triL is located between S1 and S2, and wherein S1 and S2 form a second duplex (D2). D2 may have various length. In some embodiments, D2 is about 1-6 bp in length. In some embodiments, D2 is 2-6, 3-6, 4-6, 5-6, 1-5, 2-5, 3-5 or 4-5 bp in length. In some embodiments, D2 is 1, 2, 3, 4, 5 or 6 bp in length. In some embodiments, D2 is 6 bp in length.

[0414] In some embodiments, R1 of the sense strand and the antisense strand form a first duplex (D1). In some embodiments, D1 is at least about 15 (e.g., at least 15, at least 16, at least 17, at least 18, at least 19, at least 20 or at least 21) nucleotides in length. In some embodiments, D1 is in the range of about 12 to 30 nucleotides in length (e.g., 12 to 30, 12 to 27, 15 to 22, 18 to 22, 18 to 25, 18 to 27, 18 to 30 or 21 to 30 nucleotides in length). In some embodiments, D1 is at least 12 nucleotides in length (e.g., at least 12, at least 15, at least 20, at least 25, or at least 30 nucleotides in length). In some embodiments, D1 is 12, 13, 14, 15, 16, 17, 18, 19, 20, 21, 22, 23, 24, 25, 26, 27, 28, 29 or 30 nucleotides in length. In some embodiments, D1 is 20 nucleotides in length. In some embodiments, D1 comprising sense strand and antisense strand does not span the entire length of the sense strand and/or antisense strand. In some embodiments, D1 comprising the sense strand and antisense strand spans the entire length of either the sense strand or antisense strand or both. In certain embodiments, D1 comprising the sense strand and antisense strand spans the entire length of both the sense strand and the antisense strand.

[0415] It should be appreciated that, in some embodiments, sequences presented in the Sequence Listing may be referred to in describing the structure of an oligonucleotide or other nucleic acid. In such embodiments, the actual oligonucleotide or other nucleic acid may have one or more alternative nucleotides (e.g., an RNA counterpart of a DNA nucleotide or a DNA counterpart of an RNA nucleotide) and/or one or more modified nucleotides and/or one or more modified internucleotide linkages and/or one or more other modification when compared with the specified sequence while retaining essentially same or similar complementary properties as the specified sequence.

[0416] In some embodiments, a double-stranded RNA (dsRNA) herein comprises a 25-nucleotide sense strand and a 27-nucleotide antisense strand that when acted upon by a Dicer enzyme results in an antisense strand that is incorporated into the mature RISC. In some embodiments, the sense strand of the dsRNA is longer than 27 nucleotides (e.g., 28, 29, 30, 31, 32, 33, 34, 35, 36, 37, 38, 39 or 40 nucleotides). In some embodiments, the sense strand of the dsRNA is longer than 27 nucleotides (e.g., 28, 29, 30, 31, 32, 33, 34, 35, 36, 37, 38, 39, 40, 41, 42, 43, 44, 45, 46, 47, 48, 49, or 50 nucleotides). In some embodiments, the sense strand of the dsRNA is longer than 25 nucleotides (e.g., 26, 27, 28, 29 or 30 nucleotides).

[0417] In some embodiments, oligonucleotides herein have one 5′ end that is thermodynamically less stable when compared to the other 5′ end. In some embodiments, an asymmetry oligonucleotide is provided that includes a blunt end at the 3′ end of a sense strand and a 3′-overhang at the 3′ end of an antisense strand. In some embodiments, the 3′-overhang on the antisense strand is about 1-8 nucleotides in length (e.g., 1, 2, 3, 4, 5, 6, 7 or 8 nucleotides in length). Typically, an oligonucleotide for RNAi has a two-nucleotide overhang on the 3′ end of the antisense (guide) strand. However, other overhangs are possible. In some embodiments, an overhang is a 3′-overhang comprising a length of between 1 and 6 nucleotides, optionally 1 to 5, 1 to 4, 1 to 3, 1 to 2, 2 to 6, 2 to 5, 2 to 4, 2 to 3, 3 to 6, 3 to 5, 3 to 4, 4 to 6, 4 to 5, 5 to 6 nucleotides, or 1, 2, 3, 4, 5 or 6 nucleotides. However, in some embodiments, the overhang is a 5′-overhang comprising a length of between 1 and 6 nucleotides, optionally 1 to 5, 1 to 4, 1 to 3, 1 to 2, 2 to 6, 2 to 5, 2 to 4, 2 to 3, 3 to 6, 3 to 5, 3 to 4, 4 to 6, 4 to 5, 5 to 6 nucleotides, or 1, 2, 3, 4, 5 or 6 nucleotides.

[0418] In some embodiments, two terminal nucleotides on the 3′ end of an antisense strand are modified. In some embodiments, the two terminal nucleotides on the 3′ end of the antisense strand are complementary with the target mRNA. In some embodiments, the two terminal nucleotides on the 3′ end of the antisense strand are not complementary with the target mRNA. In some embodiments, the two terminal nucleotides on the 3′ end of the antisense strand of an oligonucleotide herein comprise an unpaired GG. In some embodiments, the two (2) terminal nucleotides on the 3′ end of an antisense strand of an oligonucleotide herein are not complementary to the target mRNA. In some embodiments, two terminal nucleotides on each 3′ end of an oligonucleotide in the nicked tetraloop structure are GG. In some embodiments, one or both of the two (2) terminal GG nucleotides on each 3′ end of an oligonucleotide herein is not complementary with the target mRNA. Typically, one or both two terminal GG nucleotides on each 3′ end of an oligonucleotide is not complementary with the target.

[0419] In some embodiments, there is one or more (e.g., 1, 2, 3, 4 or 5) mismatch between a sense and antisense strand. If there is more than one mismatch between a sense and antisense strand, they may be positioned consecutively (e.g., 2, 3 or more in a row), or interspersed throughout the region of complementarity. In some embodiments, the 3′ end of the sense strand contains one or more mismatches. In one embodiment, two mismatches are incorporated at the 3′ end of the sense strand. In some embodiments, base mismatches, or destabilization of segments at the 3′ end of the sense strand of the oligonucleotide improved the potency of synthetic duplexes in RNAi, possibly through facilitating processing by Dicer.

a. Antisense Strands

[0420] In some embodiments, a dsRNA comprises an antisense strand of up to about 40 nucleotides in length (e.g., up to 40, up to 35, up to 30, up to 27, up to 25, up to 21, up to 19, up to 17 or up to 12 nucleotides in length). In some embodiments, an oligonucleotide herein (e.g., an RNAi oligonucleotide) comprises an antisense strand of up to about 50 nucleotides in length (e.g., up to 50, up to 40, up to 35, up to 30, up to 27, up to 25, up to 21, up to 19, up to 17 or up to 12 nucleotides in length). In some embodiments, an oligonucleotide may have an antisense strand of at least about 12 nucleotides in length (e.g., at least 12, at least 15, at least 19, at least 21, at least 22, at least 25, at least 27, at least 30, at least 35 or at least 38 nucleotides in length). In some embodiments, an oligonucleotide may have an antisense strand in a range of about 12 to about 40 (e.g., 12 to 40, 12 to 36, 12 to 32, 12 to 28, 15 to 40, 15 to 36, 15 to 32, 15 to 28, 17 to 22, 17 to 25, 19 to 27, 19 to 30, 20 to 40, 22 to 40, 25 to 40 or 32 to 40) nucleotides in length. In some embodiments, an oligonucleotide comprises antisense strand of 15 to 30 nucleotides in length. In some embodiments, an oligonucleotide may have an antisense strand of 12, 13, 14, 15, 16, 17, 18, 19, 20, 21, 22, 23, 24, 25, 26, 27, 28, 29, 30, 31, 32, 33, 34, 35, 36, 37, 38, 39 or 40 nucleotides in length.

[0421] In some embodiments, an antisense strand of an oligonucleotide may be referred to as a “guide strand.” For example, if an antisense strand can engage with RNA-induced silencing complex (RISC) and bind to an Argonaute protein such as Ago2, or engage with or bind to one or more similar factors, and direct silencing of a target gene, it may be referred to as a guide strand. In some embodiments, a sense strand complementary to a guide strand may be referred to as a “passenger strand.”

b. Sense Strands

[0422] In some embodiments, an oligonucleotide comprises a sense strand (or passenger strand) of up to about 40 nucleotides in length (e.g., up to 40, up to 36, up to 30, up to 27, up to 25, up to 21, up to 19, up to 17 or up to 12 nucleotides in length). In some embodiments, an oligonucleotide may have a sense strand of at least about 12 nucleotides in length (e.g., at least 12, at least 15, at least 19, at least 21, at least 25, at least 27, at least 30, at least 36 or at least 38 nucleotides in length). In some embodiments, an oligonucleotide may have a sense strand in a range of about 12 to about 40 (e.g., 12 to 40, 12 to 36, 12 to 32, 12 to 28, 15 to 40, 15 to 36, 15 to 32, 15 to 28, 17 to 21, 17 to 25, 19 to 27, 19 to 30, 20 to 40, 22 to 40, 25 to 40 or 32 to 40) nucleotides in length. In some embodiments, an oligonucleotide herein comprises a sense strand of 15 to 50 nucleotides in length. In some embodiments, an oligonucleotide herein comprises a sense strand of 18 to 36 nucleotides in length. In some embodiments, an oligonucleotide may have a sense strand of 12, 13, 14, 15, 16, 17, 18, 19, 20, 21, 22, 23, 24, 25, 26, 27, 28, 29, 30, 31, 32, 33, 34, 35, 36, 37, 38, 39 or 40 nucleotides in length. In some embodiments, an oligonucleotide comprises a sense strand of 12, 13, 14, 15, 16, 17, 18, 19, 20, 21, 22, 23, 24, 25, 26, 27, 28, 29, 30, 31, 32, 33, 34, 35, 36, 37, 38, 39, 40, 41, 42, 43, 44, 45, 46, 47, 48, 49, or 50 nucleotides in length. In some embodiments, an oligonucleotide herein comprises a sense strand of 36 nucleotides in length.

[0423] In some embodiments, an oligonucleotide provided herein (e.g., an RNAi oligonucleotide) comprises a sense strand comprising a stem-loop structure at the 3′ end of the sense strand. In some embodiments, the stem-loop is formed by intrastrand base pairing. In some embodiments, a sense strand comprises a stem-loop structure at its 5′ end. In some embodiments, the stem of the stem-loop comprises a duplex of 2, 3, 4, 5, 6, 7, 8, 9, 10, 11, 12, 13 or 14 nucleotides in length. In some embodiments, the stem of the stem-loop comprises a duplex of 2 nucleotides in length. In some embodiments, the stem of the stem-loop comprises a duplex of 3 nucleotides in length. In some embodiments, the stem of the stem-loop comprises a duplex of 4 nucleotides in length. In some embodiments, the stem of the stem-loop comprises a duplex of 5 nucleotides in length. In some embodiments, the stem of the stem-loop comprises a duplex of 6 nucleotides in length. In some embodiments, the stem of the stem-loop comprises a duplex of 7 nucleotides in length. In some embodiments, the stem of the stem-loop comprises a duplex of 8 nucleotides in length. In some embodiments, the stem of the stem-loop comprises a duplex of 9 nucleotides in length. In some embodiments, the stem of the stem-loop comprises a duplex of 10 nucleotides in length. In some embodiments, the stem of the stem-loop comprises a duplex of 11 nucleotides in length. In some embodiments, the stem of the stem-loop comprises a duplex of 12 nucleotides in length. In some embodiments, the stem of the stem-loop comprises a duplex of 13 nucleotides in length. In some embodiments, the stem of the stem-loop comprises a duplex of 14 nucleotides in length.

[0424] In some embodiments, a stem-loop provides the oligonucleotide protection against degradation (e.g., enzymatic degradation), facilitates or improves targeting and/or delivery to a target cell, tissue, or organ (e.g., the liver), or both. For example, in some embodiments, the loop of a stem-loop is comprised of nucleotides comprising one or more modifications that facilitate, improve, or increase targeting to a target, inhibition of target gene expression, and/or delivery, uptake, and/or penetrance into a target cell, tissue, or organ (e.g., the liver), or a combination thereof. In some embodiments, the stem-loop itself or modification(s) to the stem-loop do not affect or do not substantially affect the inherent gene expression inhibition activity of the oligonucleotide, but facilitates, improves, or increases stability (e.g., provides protection against degradation) and/or delivery, uptake, and/or penetrance of the oligonucleotide to a target cell, tissue, or organ. In certain embodiments, an oligonucleotide herein comprises a sense strand comprising (e.g., at its 3′ end) a stem-loop set forth as: S1-L-S2, in which S1 is complementary to S2, and in which L forms a single-stranded loop of linked nucleotides between S1 and S2 of up to about 10 nucleotides in length (e.g., 3, 4, 5, 6, 7, 8, 9 or 10 nucleotides in length). In some embodiments, the loop (L) is 3 nucleotides in length (referred to herein as “triloop”. In some embodiments, the loop (L) is 4 nucleotides in length (referred to herein as “tetraloop”). In some embodiments, the loop (L) is 5 nucleotides in length. In some embodiments, the loop (L) is 6 nucleotides in length. In some embodiments, the loop (L) is 7 nucleotides in length. In some embodiments, the loop (L) is 8 nucleotides in length. In some embodiments, the loop (L) is 9 nucleotides in length. In some embodiments, the loop (L) is 10 nucleotides in length.

[0425] In some embodiments, the tetraloop comprises the sequence 5′-GAAA-3′. In some embodiments, the stem loop comprises the sequence 5′-GCAGCCGAAAGGCUGC-3′ (SEQ ID NO: 86).

[0426] In some embodiments, a sense strand comprises a stem-loop structure at its 3′ end. In some embodiments, a sense strand comprises a stem-loop structure at its 5′ end. In some embodiments, a stem is a duplex of 2, 3, 4, 5, 6, 7, 8, 9, 10, 11, 12, 13 or 14 bp in length. In some embodiments, a stem-loop provides the molecule protection against degradation (e.g., enzymatic degradation) and facilitates targeting characteristics for delivery to a target cell. For example, in some embodiments, a loop provides added nucleotides on which modification can be made without substantially affecting the gene expression inhibition activity of an oligonucleotide. In certain embodiments, an oligonucleotide is herein in which the sense strand comprises (e.g., at its 3′ end) a stem-loop set forth as: S1-L-S2, in which S1 is complementary to S2, and in which L forms a loop between S1 and S2 of up to about 10 nucleotides in length (e.g., 3, 4, 5, 6, 7, 8, 9 or 10 nucleotides in length). FIG. 1 depicts non-limiting examples of such an oligonucleotide.

[0427] In some embodiments, a loop (L) of a stem-loop having the structure S1-L-S2 as described herein is a triloop. In some embodiments, the triloop comprises ribonucleotides, deoxyribonucleotides, modified nucleotides, ligands (e.g., delivery ligands), and combinations thereof.

[0428] In some embodiments, a loop of a stem-loop is a tetraloop (e.g., within a nicked tetraloop structure). A tetraloop may contain ribonucleotides, deoxyribonucleotides, modified nucleotides and combinations thereof. Typically, a tetraloop has 4 to 5 nucleotides.

### Duplex Length

[0429] In some embodiments, a duplex formed between a sense and antisense strand is at least 12 (e.g., at least 15, at least 16, at least 17, at least 18, at least 19, at least 20, or at least 21) nucleotides in length. In some embodiments, a duplex formed between a sense and antisense strand is in the range of 12-30 nucleotides in length (e.g., 12 to 30, 12 to 27, 12 to 22, 15 to 25, 18 to 30, 18 to 22, 18 to 25, 18 to 27, 18 to 30, 19 to 30 or 21 to 30 nucleotides in length). In some embodiments, a duplex formed between a sense and antisense strand is 12, 13, 14, 15, 16, 17, 18, 19, 29, 21, 22, 23, 24, 25, 26, 27, 28, 29 or 30 nucleotides in length. In some embodiments, a duplex formed between a sense and antisense strand is 12 nucleotides in length. In some embodiments, a duplex formed between a sense and antisense strand is 13 nucleotides in length. In some embodiments, a duplex formed between a sense and antisense strand is 14 nucleotides in length. In some embodiments, a duplex formed between a sense and antisense strand is 15 nucleotides in length. In some embodiments, a duplex formed between a sense and antisense strand is 16 nucleotides in length. In some embodiments, a duplex formed between a sense and antisense strand is 17 nucleotides in length. In some embodiments, a duplex formed between a sense and antisense strand is 18 nucleotides in length. In some embodiments, a duplex formed between a sense and antisense strand is 19 nucleotides in length. In some embodiments, a duplex formed between a sense and antisense strand is 20 nucleotides in length. In some embodiments, a duplex formed between a sense and antisense strand is 21 nucleotides in length. In some embodiments, a duplex formed between a sense and antisense strand is 22 nucleotides in length. In some embodiments, a duplex formed between a sense and antisense strand is 23 nucleotides in length. In some embodiments, a duplex formed between a sense and antisense strand is 24 nucleotides in length. In some embodiments, a duplex formed between a sense and antisense strand is 25 nucleotides in length. In some embodiments, a duplex formed between a sense and antisense strand is 26 nucleotides in length. In some embodiments, a duplex formed between a sense and antisense strand is 27 nucleotides in length. In some embodiments, a duplex formed between a sense and antisense strand is 28 nucleotides in length. In some embodiments, a duplex formed between a sense and antisense strand is 29 nucleotides in length. In some embodiments, a duplex formed between a sense and antisense strand is 30 nucleotides in length. In some embodiments, a duplex formed between a sense and antisense strand does not span the entire length of the sense strand and/or antisense strand. In some embodiments, a duplex between a sense and antisense strand spans the entire length of either the sense or antisense strands. In some embodiments, a duplex between a sense and antisense strand spans the entire length of both the sense strand and the antisense strand.

### Oligonucleotide Termini

[0430] In some embodiments, an oligonucleotide disclosed herein (e.g., an RNAi oligonucleotide) comprises a sense strand and an antisense strand, wherein the termini of either or both strands comprise a blunt end. In some embodiments, an oligonucleotide herein comprises sense and antisense strands that are separate strands which form an asymmetric duplex region having an overhang at the 3′ terminus of the antisense strand. In some embodiments, an oligonucleotide herein comprises a sense strand and an antisense strand, wherein the termini of either or both strands comprise an overhang comprising one or more nucleotides. In some embodiments, the one or more nucleotides comprising the overhang are unpaired nucleotides. In some embodiments, an oligonucleotide herein comprises a sense strand and an antisense strand, wherein the 3′ termini of the sense strand and the 5′ termini of the antisense strand comprise a blunt end. In some embodiments, an oligonucleotide herein comprises a sense strand and an antisense strand, wherein the 5′ termini of the sense strand and the 3′ termini of the antisense strand comprise a blunt end.

[0431] In some embodiments, an oligonucleotide herein comprises a sense strand and an antisense strand, wherein the 3′ terminus of either or both strands comprise a 3′-overhang comprising one or more nucleotides. In some embodiments, an oligonucleotide herein comprises a sense strand and an antisense strand, wherein the sense strand comprises a 3′-overhang comprising one or more nucleotides. In some embodiments, an oligonucleotide herein comprises a sense strand and an antisense strand, wherein the antisense strand comprises a 3′-overhang comprising one or more nucleotides. In some embodiments, an oligonucleotide herein comprises a sense strand and an antisense strand, wherein both the sense strand and the antisense strand comprises a 3′-overhang comprising one or more nucleotides.

[0432] In some embodiments, the 3′-overhang is about one (1) to twenty (20) nucleotides in length (e.g., about 1, 2, 3, 4, 5, 6, 7, 8, 9, 10, 11, 12, 13, 14, 15, 16, 17, 18, 19, or about 20 nucleotides in length). In some embodiments, the 3′ overhang is about one (1) to nineteen (19), one (1) to eighteen (18), one (1) to seventeen (17), one (1) to sixteen (16), one (1) to fifteen (15), one (1) to fourteen (14), one (1) to thirteen (13), one (1) to twelve (12), one (1) to eleven (11), one (1) to ten (10), one (1) to nine (9), one (1) to eight (8), one (1) to seven (7), one (1) to six (6), one (1) to five (5), one (1) to four (4), one (1) to three (3), or about one (1) to two (2) nucleotides in length. In some embodiments, the 3′-overhang is (1) nucleotide in length. In some embodiments, the 3′-overhang is two (2) nucleotides in length. In some embodiments, the 3′-overhang is three (3) nucleotides in length. In some embodiments, the 3′-overhang is four (4) nucleotides in length. In some embodiments, the 3′-overhang is five (5) nucleotides in length. In some embodiments, the 3′-overhang is six (6) nucleotides in length. In some embodiments, the 3′-overhang is seven (7) nucleotides in length. In some embodiments, the 3′-overhang is eight (8) nucleotides in length. In some embodiments, the 3′-overhang is nine (9) nucleotides in length. In some embodiments, the 3′-overhang is ten (10) nucleotides in length. In some embodiments, the 3′-overhang is eleven (11) nucleotides in length. In some embodiments, the 3′-overhang is twelve (12) nucleotides in length. In some embodiments, the 3′-overhang is thirteen (13) nucleotides in length. In some embodiments, the 3′-overhang is fourteen (14) nucleotides in length. In some embodiments, the 3′-overhang is fifteen (15) nucleotides in length. In some embodiments, the 3′-overhang is sixteen (16) nucleotides in length. In some embodiments, the 3′-overhang is seventeen (17) nucleotides in length. In some embodiments, the 3′-overhang is eighteen (18) nucleotides in length. In some embodiments, the 3′-overhang is nineteen (19) nucleotides in length. In some embodiments, the 3′-overhang is twenty (20) nucleotides in length.

[0433] In some embodiments, an oligonucleotide herein comprises a sense strand and an antisense strand, wherein the 5′ terminus of either or both strands comprise a 5′-overhang comprising one or more nucleotides. In some embodiments, an oligonucleotide herein comprises a sense strand and an antisense strand, wherein the sense strand comprises a 5′-overhang comprising one or more nucleotides. In some embodiments, an oligonucleotide herein comprises a sense strand and an antisense strand, wherein the antisense strand comprises a 5′-overhang comprising one or more nucleotides. In some embodiments, an oligonucleotide herein comprises a sense strand and an antisense strand, wherein both the sense strand and the antisense strand comprises a 5′-overhang comprising one or more nucleotides.

[0434] In some embodiments, the 5′-overhang is about one (1) to twenty (20) nucleotides in length (e.g., about 1, 2, 3, 4, 5, 6, 7, 8, 9, 10, 11, 12, 13, 14, 15, 16, 17, 18, 19, or about 20 nucleotides in length). In some embodiments, the 5′ overhang is about one (1) to nineteen (19), one (1) to eighteen (18), one (1) to seventeen (17), one (1) to sixteen (16), one (1) to fifteen (15), one (1) to fourteen (14), one (1) to thirteen (13), one (1) to twelve (12), one (1) to eleven (11), one (1) to ten (10), one (1) to nine (9), one (1) to eight (8), one (1) to seven (7), one (1) to six (6), one (1) to five (5), one (1) to four (4), one (1) to three (3), or about one (1) to two (2) nucleotides in length. In some embodiments, the 5′-overhang is (1) nucleotide in length. In some embodiments, the 5′-overhang is two (2) nucleotides in length. In some embodiments, the 5′-overhang is three (3) nucleotides in length. In some embodiments, the 5′-overhang is four (4) nucleotides in length. In some embodiments, the 5′-overhang is five (5) nucleotides in length. In some embodiments, the 5′-overhang is six (6) nucleotides in length. In some embodiments, the 5′-overhang is seven (7) nucleotides in length. In some embodiments, the 5′-overhang is eight (8) nucleotides in length. In some embodiments, the 5′-overhang is nine (9) nucleotides in length. In some embodiments, the 5′-overhang is ten (10) nucleotides in length. In some embodiments, the 5′-overhang is eleven (11) nucleotides in length. In some embodiments, the 5′-overhang is twelve (12) nucleotides in length. In some embodiments, the 5′-overhang is thirteen (13) nucleotides in length. In some embodiments, the 5′-overhang is fourteen (14) nucleotides in length. In some embodiments, the 5′-overhang is fifteen (15) nucleotides in length. In some embodiments, the 5′-overhang is sixteen (16) nucleotides in length. In some embodiments, the 5′-overhang is seventeen (17) nucleotides in length. In some embodiments, the 5′-overhang is eighteen (18) nucleotides in length. In some embodiments, the 5′-overhang is nineteen (19) nucleotides in length. In some embodiments, the 5′-overhang is twenty (20) nucleotides in length.

[0435] In some embodiments, one or more (e.g., 2, 3, 4, 5, or more) nucleotides comprising the 3′ terminus or 5′ terminus of a sense and/or antisense strand are modified. For example, in some embodiments, one or two terminal nucleotides of the 3′ terminus of the antisense strand are modified. In some embodiments, the last nucleotide at the 3′ terminus of an antisense strand is modified, such that it comprises 2′ modification, or it comprises, a 2′-O-methoxyethyl. In some embodiments, the last one or two terminal nucleotides at the 3′ terminus of an antisense strand are complementary with the target. In some embodiments, the last one or two nucleotides at the 3′ terminus of the antisense strand are not complementary with the target.

[0436] In some embodiments, an oligonucleotide disclosed herein (e.g., an RNAi oligonucleotide) comprises a sense strand and an antisense strand, wherein the 3′ terminus of the sense strand comprises a step-loop described herein and the 3′ terminus of the antisense strand comprises a 3′-overhang described herein. In some embodiments, an oligonucleotide herein (e.g., an RNAi oligonucleotide) comprises a sense strand and an antisense strand that form a nicked tetraloop structure described herein, wherein the 3′ terminus of the sense strand comprises a stem-loop, wherein the loop is a tetraloop described herein, and wherein the 3′ terminus of the antisense strand comprises a 3′-overhang described herein. In some embodiments, the 3′-overhang is two (2) nucleotides in length. In some embodiments, the two (2) nucleotides comprising the 3′-overhang both comprise guanine (G) nucleobases. Typically, one or both of the nucleotides comprising the 3′-overhang of the antisense strand are not complementary with the target mRNA.

### Oligonucleotide Modifications

[0437] a. Sugar Modifications

[0438] In some embodiments, a modified sugar (also referred herein to a sugar analog) includes a modified deoxyribose or ribose moiety in which, for example, one or more modifications occur at the 2′, 3′, 4′ and/or 5′ carbon position of the sugar. In some embodiments, a modified sugar may also include non-natural alternative carbon structures such as those present in locked nucleic acids (“LNA”; see, e.g., Koshkin et al., (1998) TETRAHEDON 54:3607-3630), unlocked nucleic acids (“UNA”; see, e.g., Snead et al., (2013) MOL. THER-NUCL. ACIDS 2:e103) and bridged nucleic acids (“BNA”; see, e.g., Imanishi and Obika (2002) CHEM COMMUN. (CAMB) 21:1653-1659).

[0439] In some embodiments, a nucleotide modification in a sugar comprises a 2′-modification. In some embodiments, a 2′-modification may be 2′-O-propargyl, 2′-O-propylamin, 2′-amino, 2′-ethyl, 2′-fluoro (2′-F), 2′-aminoethyl (EA), 2′-O-methyl (2′-OMe), 2′-O-methoxyethyl (2′-MOE), 2′-O-[2-(methylamino)-2-oxoethyl] (2′-O-NMA) or 2′-deoxy-2′-fluoro-β-d-arabinonucleic acid (2′-FANA). In some embodiments, the modification is 2′-F, 2′-OMe or 2′-MOE. In some embodiments, a modification in a sugar comprises a modification of the sugar ring, which may comprise modification of one or more carbons of the sugar ring. For example, a modification of a sugar of a nucleotide may comprise a 2′-oxygen of a sugar is linked to a 1′-carbon or 4′-carbon of the sugar, or a 2′-oxygen is linked to the 1′-carbon or 4′-carbon via an ethylene or methylene bridge. In some embodiments, a modified nucleotide has an acyclic sugar that lacks a 2′-carbon to 3′-carbon bond. In some embodiments, a modified nucleotide has a thiol group, e.g., in the 4′ position of the sugar.

[0440] In some embodiments, the oligonucleotide described herein comprises at least about 1 modified nucleotide (e.g., at least 1, at least 5, at least 10, at least 15, at least 20, at least 25, at least 30, at least 35, at least 40, at least 45, at least 50, at least 55, at least 60, or more). In some embodiments, the sense strand of the oligonucleotide comprises at least about 1 modified nucleotide (e.g., at least 1, at least 5, at least 10, at least 15, at least 20, at least 25, at least 30, at least 35, or more). In some embodiments, the antisense strand of the oligonucleotide comprises at least about 1 modified nucleotide (e.g., at least 1, at least 5, at least 10, at least 15, at least 20, or more).

[0441] In some embodiments, all the nucleotides of the sense strand of the oligonucleotide are modified. In some embodiments, all the nucleotides of the antisense strand of the oligonucleotide are modified. In some embodiments, all the nucleotides of the oligonucleotide (i.e., both the sense strand and the antisense strand) are modified. In some embodiments, the modified nucleotide comprises a 2′-modification (e.g., a 2′-F or 2′-OMe, 2′-MOE, and 2′-deoxy-2′-fluoro-(3-d-arabinonucleic acid). In some embodiments, the modified nucleotide comprises a 2′-modification (e.g., a 2′-F or 2′-OMe).

[0442] In some embodiments, the disclosure provides oligonucleotides having different modification patterns. In some embodiments, an oligonucleotide herein comprises a sense strand having a modification pattern as set forth in the Examples and Sequence Listing and an antisense strand having a modification pattern as set forth in the Examples and Sequence Listing.

[0443] In some embodiments, an oligonucleotide disclosed herein (e.g., an RNAi oligonucleotide) comprises an antisense strand having nucleotides that are modified with 2′-F. In some embodiments, an oligonucleotide herein comprises an antisense strand comprising nucleotides that are modified with 2′-F and 2′-OMe. In some embodiments, an oligonucleotide disclosed herein comprises a sense strand having nucleotides that are modified with 2′-F. In some embodiments, an oligonucleotide disclosed herein comprises a sense strand comprises nucleotides that are modified with 2′-F and 2′-OMe.

[0444] In some embodiments, an oligonucleotide described herein comprises a sense strand with about 10-15%, 10%, 11%, 12%, 13%, 14% or 15% of the nucleotides of the sense strand comprising a 2′-fluoro modification. In some embodiments, about 11% of the nucleotides of the sense strand comprise a 2-fluoro modification. In some embodiments, an oligonucleotide described herein comprises an antisense strand with about 25-35%, 25%, 26%, 27%, 28%, 29%, 30%, 31%, 32%, 33%, 34% or 35% of the nucleotides of the antisense strand comprising a 2′-fluoro modification. In some embodiments, about 32% of the nucleotides of the antisense strand comprise a 2′-fluoro modification. In some embodiments, the oligonucleotide has about 15-25%, 15%, 16%, 17%, 18%, 19%, 20%, 21%, 22%, 23%, 24%, or 25% of its nucleotides comprising a 2′-fluoro modification. In some embodiments, about 19% of the nucleotides in the dsRNAi oligonucleotide comprise a 2′-fluoro modification.

[0445] In some embodiments, the modified oligonucleotides comprise a sense strand sequence having a modification pattern as set forth in FIG. 1 or Example 12 and an antisense strand having a modification pattern as set forth in FIG. 1 or Example 12. In some embodiments, for these oligonucleotides, one or more of positions 8, 9, 10 or 11 of the sense strand is modified with a 2′—F group. In other embodiments, for these oligonucleotides, the sugar moiety at each of nucleotides at positions 1-7 and 12-20 in the sense strand is modified with a 2′-OMe.

[0446] In some embodiments, the antisense strand has 3 nucleotides that are modified at the 2′-position of the sugar moiety with a 2′-F. In some embodiments, the sugar moiety at positions 2, 5 and 14 and optionally up to 3 of the nucleotides at positions 1, 3, 7 and 10 of the antisense strand are modified with a 2′-F. In some embodiments, the sugar moiety at positions 2, 5 and 14 and optionally up to 3 of the nucleotides at positions 3, 4, 7 and 10 of the antisense strand are modified with a 2′-F. In other embodiments, the sugar moiety at each of the positions at positions 2, 5 and 14 of the antisense strand is modified with the 2′-F. In other embodiments, the sugar moiety at each of the positions at positions 1, 2, 5 and 14 of the antisense strand is modified with the 2′-F. In other embodiments, the sugar moiety at each of the positions at positions 2, 4, 5 and 14 of the antisense strand is modified with the 2′-F. In still other embodiments, the sugar moiety at each of the positions at positions 1, 2, 3, 5, 7 and 14 of the antisense strand is modified with the 2′-F. In other embodiments, the sugar moiety at each of the positions at positions 2, 3, 4, 5, 7 and 14 of the antisense strand is modified with the 2′-F. In yet another embodiment, the sugar moiety at each of the positions at positions 1, 2, 3, 5, 10 and 14 of the antisense strand is modified with the 2′-F. In other embodiments, the sugar moiety at each of the positions at positions 2, 3, 4, 5, 10 and 14 of the antisense strand is modified with the 2′-F. In another embodiment, the sugar moiety at each of the positions at positions 2, 3, 5, 7, 10 and 14 of the antisense strand is modified with the 2′-F. In yet another embodiment, the sugar moiety at each of the positions at positions 2, 3, 4, 5, 7, 10 and 14 of the antisense strand is modified with the 2′-F.

[0447] In some embodiments, an oligonucleotide provided herein comprises an antisense strand having the sugar moiety at position 1, position 2, position 3, position 4, position 5, position 6, position 7, position 8, position 9, position 10, position 11, position 12, position 13, position 14, position 15, position 16, position 17, position 18, position 19, position 20, position 21, or position 22 modified with 2′-F.

[0448] In some embodiments, an oligonucleotide provided herein comprises an antisense strand having the sugar moiety at position 1, position 2, position 3, position 4, position 5, position 6, position 7, position 8, position 9, position 10, position 11, position 12, position 13, position 14, position 15, position 16, position 17, position 18, position 19, position 20, position 21, or position 22 modified with 2′-OMe.

[0449] In some embodiments, an oligonucleotide provided herein comprises an antisense strand having the sugar moiety at position 1, position 2, position 3, position 4, position 5, position 6, position 7, position 8, position 9, position 10, position 11, position 12, position 13, position 14, position 15, position 16, position 17, position 18, position 19, position 20, position 21, or position 22 modified with a modification selected from the group consisting of 2′-O-propargyl, 2′-O-propylamin, 2′-amino, 2′-ethyl, 2′-aminoethyl (EA), 2′-O-methyl (2′-OMe), 2′-O-methoxyethyl (2′-M0E), 2′-O-[2-(methylamino)-2-oxoethyl] (2′-O-NMA), and 2′-deoxy-2′-fluoro-β-d-arabinonucleic acid (2′-FANA).

[0450] In some embodiments, an oligonucleotide provided herein comprises a sense strand having the sugar moiety at positions 8-11 modified with 2′-F. In some embodiments, an oligonucleotide provided herein comprises a sense strand having the sugar moiety at positions 3, 8, 9, 10, 12, 13 and 17 modified with 2′-F. In some embodiments, an oligonucleotide provided herein comprises a sense strand having the sugar moiety at positions 1-7 and 12-17 or 12-20 modified with 2′OMe. In some embodiments, an oligonucleotide provided herein comprises a sense strand having the sugar moiety at positions 1-7, 12-27 and 31-36 modified with 2′OMe. In some embodiments, an oligonucleotide provided herein comprises a sense strand having the sugar moiety of each of the nucleotides at positions 1-7 and 12-17 or 12-20 of the sense strand modified with a modification selected from the group consisting of 2′-O-propargyl, 2′-O-propylamin, 2′-amino, 2′-ethyl, 2′-aminoethyl (EA), 2′-O-methyl (2′-OMe), 2′-O-methoxyethyl (2′-MOE), 2′-O-[2-(methylamino)-2-oxoethyl] (2′-O-NMA), and 2′-deoxy-2′-fluoro-f3-d-arabinonucleic acid (2′-FANA). In some embodiments, an oligonucleotide provided herein comprises a sense strand having the sugar moiety at positions 1-2, 4-7, 11, 14-16 and 18-20 modified with 2′OMe. In some embodiments, an oligonucleotide provided herein comprises a sense strand having the sugar moiety of each of the nucleotides at positions 1-2, 4-7, 11, 14-16 and 18-20 of the sense strand modified with a modification selected from the group consisting of 2′-O-propargyl, 2′-O-propylamin, 2′-amino, 2′-ethyl, 2′-aminoethyl (EA), 2′-O-methyl (2′-OMe), 2′-O-methoxyethyl (2′-MOE), 2′-O-[2-(methylamino)-2-oxoethyl] (2′-O-NMA), and 2′-deoxy-2′-fluoro-β-d-arabinonucleic acid (2′-FANA).

[0451] In some embodiments, an oligonucleotide provided herein comprises a sense strand having the sugar moiety at position 1, position 2, position 3, position 4, position 5, position 6, position 7, position 8, position 9, position 10, position 11, position 12, position 13, position 14, position 15, position 16, position 17, position 18, position 19, position 20, position 21, position 22, position 23, position 24, position 25, position 26, position 27, position 28, position 29, position 30, position 31, position 32, position 33, position 34, position 35, or position 36 modified with 2′-F.

[0452] In some embodiments, an oligonucleotide provided herein comprises a sense strand having the sugar moiety at position 1, position 2, position 3, position 4, position 5, position 6, position 7, position 8, position 9, position 10, position 11, position 12, position 13, position 14, position 15, position 16, position 17, position 18, position 19, position 20, position 21, position 22, position 23, position 24, position 25, position 26, position 27, position 28, position 29, position 30, position 31, position 32, position 33, position 34, position 35, or position 36 modified with 2′-OMe.

[0453] In some embodiments, an oligonucleotide provided herein comprises a sense strand having the sugar moiety at position 1, position 2, position 3, position 4, position 5, position 6, position 7, position 8, position 9, position 10, position 11, position 12, position 13, position 14, position 15, position 16, position 17, position 18, position 19, position 20, position 21, position 22, position 23, position 24, position 25, position 26, position 27, position 28, position 29, position 30, position 31, position 32, position 33, position 34, position 35, or position 36 modified with a modification selected from the group consisting of 2′-O-propargyl, 2′-O-propylamin, 2′-amino, 2′-ethyl, 2′-aminoethyl (EA), 2′-O-methyl (2′-OMe), 2′-O-methoxyethyl (2′-MOE), 2′-O-[2-(methylamino)-2-oxoethyl] (2′-O-WA), and 2′-deoxy-2′-fluoro-β-d-arabinonucleic acid (2′-FANA).

### b. 5′ Terminal Phosphates

[0454] In some embodiments, 5′-terminal phosphate groups of oligonucleotides enhance

[0455] the interaction with Ago2. However, oligonucleotides comprising a 5′-phosphate group may be susceptible to degradation via phosphatases or other enzymes, which can limit their bioavailability in vivo. In some embodiments, oligonucleotides include analogs of 5′ phosphates that are resistant to such degradation. In some embodiments, a phosphate analog may be oxymethylphosphonate, vinylphosphonate or malonyl phosphonate. In certain embodiments, the 1′ end of an oligonucleotide strand is attached to chemical moiety that mimics the electrostatic and steric properties of a natural 5′-phosphate group (“phosphate mimic”).

[0456] In some embodiments, an oligonucleotide has a phosphate analog at a 4′-carbon position of the sugar (referred to as a “4′-phosphate analog”). See, e.g., Intl. Patent Application Publication No. WO 2018/045317. In some embodiments, an oligonucleotide herein comprises a 4′-phosphate analog at a 5′-terminal nucleotide. In some embodiments, a phosphate analog is an oxymethylphosphonate, in which the oxygen atom of the oxymethyl group is bound to the sugar moiety (e.g., at its 4′-carbon) or analog thereof. In other embodiments, a 4′-phosphate analog is a thiomethyl phosphonate or an amino methyl phosphonate, in which the sulfur atom of the thiomethyl group or the nitrogen atom of the amino methyl group is bound to the 4′-carbon of the sugar moiety or analog thereof. In certain embodiments, a 4′-phosphate analog is an oxymethyl phosphonate. In some embodiments, an oxymethyl phosphonate is represented by the formula —O—CH₂—PO(OH)₂ or —O—CH₂—PO(OR)₂, in which R is independently selected from H, CH₃, an alkyl group, CH₂CH₂CN, CH₂OCOC(CH₃)₃, CH₂OCH₂CH₂Si (CH₃)₃ or a protecting group. In certain embodiments, the alkyl group is CH₂CH₃. More typically, R is independently selected from H, CH₃ or CH₂CH₃.

[0457] In some embodiments, an oligonucleotide provided herein comprises an antisense strand comprising a 4′-phosphate analog at the 5′-terminal nucleotide, wherein 5′-terminal nucleotide comprises the following structure:

[chemical structure]

### 4′-O-monomethylphosphonate-2′-O-methyluridine phosphorothioate [MePhosphonate-4O-mUs]

[0458] Chem 1

c. Modified Internucleotide Linkages

[0459] In some embodiments, an oligonucleotide may comprise a modified internucleoside linkage. In some embodiments, phosphate modifications or substitutions may result in an oligonucleotide that comprises at least about 1 (e.g., at least 1, at least 2, at least 3 or at least 5) modified internucleotide linkage. In some embodiments, any one of the oligonucleotides disclosed herein comprises about 1 to about 10 (e.g., 1 to 10, 2 to 8, 4 to 6, 3 to 10, 5 to 10, 1 to 5, 1 to 3 or 1 to 2) modified internucleotide linkages. In some embodiments, any one of the oligonucleotides disclosed herein comprises 1, 2, 3, 4, 5, 6, 7, 8, 9 or 10 modified internucleotide linkages.

[0460] A modified internucleotide linkage may be a phosphorodithioate linkage, 4′-O-methylene phosphonate linkage, a phosphorothioate linkage, a phosphotriester linkage, a thionoalkylphosphonate linkage, a thionalkylphosphotriester linkage, a phosphoramidite linkage, a phosphonate linkage or a boranophosphate linkage. In some embodiments, at least one modified internucleotide linkage of any one of the oligonucleotides as disclosed herein is a phosphorothioate linkage. In some embodiments, at least one modified internucleotide linkage of any one of the oligonucleotides as disclosed herein is a 4′-O-methylene phosphonate linkage.

[0461] In some embodiments, the oligonucleotide described herein has a phosphorothioate linkage between one or more of positions 1 and 2 of the sense strand, positions 1 and 2 of the antisense strand, positions 2 and 3 of the antisense strand, positions 3 and 4 of the antisense strand, positions 20 and 21 of the antisense strand, and positions 21 and 22 of the antisense strand. In some embodiments, the oligonucleotide described herein has a phosphorothioate linkage between each of positions 1 and 2 of the sense strand, positions 1 and 2 of the antisense strand, positions 2 and 3 of the antisense strand, positions 20 and 21 of the antisense strand, and positions 21 and 22 of the antisense strand.

d. Base Modifications

[0462] In some embodiments, oligonucleotides herein have one or more modified nucleobases. In some embodiments, modified nucleobases (also referred to herein as base analogs) are linked at the 1′ position of a nucleotide sugar moiety. In certain embodiments, a modified nucleobase is a nitrogenous base. In certain embodiments, a modified nucleobase does not contain nitrogen atom. See, e.g., US Patent Application Publication No. 2008/0274462. In some embodiments, a modified nucleotide comprises a universal base. However, in certain embodiments, a modified nucleotide does not contain a nucleobase (abasic).

[0463] In some embodiments, a universal base is a heterocyclic moiety located at the 1′ position of a nucleotide sugar moiety in a modified nucleotide, or the equivalent position in a nucleotide sugar moiety substitution, that, when present in a duplex, can be positioned opposite more than one type of base without substantially altering structure of the duplex. In some embodiments, compared to a reference single-stranded nucleic acid (e.g., oligonucleotide) that is fully complementary to a target nucleic acid, a single-stranded nucleic acid containing a universal base forms a duplex with the target nucleic acid that has a lower Tₘ than a duplex formed with the complementary nucleic acid. However, in some embodiments, when compared to a reference single-stranded nucleic acid in which the universal base has been replaced with a base to generate a single mismatch, the single-stranded nucleic acid containing the universal base forms a duplex with the target nucleic acid that has a higher Tₘ than a duplex formed with the nucleic acid comprising the mismatched base.

[0464] Non-limiting examples of universal-binding nucleotides include, but are not limited to, inosine, 1-β-D-ribofuranosyl-5-nitroindole and/or 1-β-D-ribofuranosyl-3-nitropyrrole (see, US Patent Application Publication No. 2007/0254362; Van Aerschot et al., (1995) NUCLEIC ACIDS RES. 23:4363-4370; Loakes et al., (1995) NUCLEIC ACIDS RES. 23:2361-66; and Loakes and Brown (1994) NUCLEIC ACIDS RES. 22:4039-43).

e. Reversible Modifications

[0465] While certain modifications to protect an oligonucleotide from the in vivo environment before reaching target cells can be made, they can reduce the potency or activity of the oligonucleotide once it reaches the cytosol of the target cell. Reversible modifications can be made such that the molecule retains desirable properties outside of the cell, which are then removed upon entering the cytosolic environment of the cell. Reversible modification can be removed, for example, by the action of an intracellular enzyme or by the chemical conditions inside of a cell (e.g., through reduction by intracellular glutathione).

[0466] In some embodiments, a reversibly modified nucleotide comprises a glutathione-sensitive moiety. Typically, nucleic acid molecules have been chemically modified with cyclic disulfide moieties to mask the negative charge created by the internucleotide diphosphate linkages and improve cellular uptake and nuclease resistance. See US Patent Application Publication No. 2011/0294869, Intl. Patent Application Publication Nos. WO 2014/088920 and WO 2015/188197, and Meade et al., (2014) NAT. BIOTECHNOL. 32:1256-63. This reversible modification of the internucleotide diphosphate linkages is designed to be cleaved intracellularly by the reducing environment of the cytosol (e.g., glutathione). Earlier examples include neutralizing phosphotriester modifications that were reported to be cleavable inside cells (see, Dellinger et al., (2003) J. AM. CHEM. Soc. 125:940-50).

[0467] In some embodiments, such a reversible modification allows protection during in vivo administration (e.g., transit through the blood and/or lysosomal/endosomal compartments of a cell) where the oligonucleotide will be exposed to nucleases and other harsh environmental conditions (e.g., pH). When released into the cytosol of a cell where the levels of glutathione are higher compared to extracellular space, the modification is reversed, and the result is a cleaved oligonucleotide. Using reversible, glutathione-sensitive moieties, it is possible to introduce sterically larger chemical groups into the oligonucleotide of interest when compared to the options available using irreversible chemical modifications. This is because these larger chemical groups will be removed in the cytosol and, therefore, should not interfere with the biological activity of the oligonucleotides inside the cytosol of a cell. As a result, these larger chemical groups can be engineered to confer various advantages to the nucleotide or oligonucleotide, such as nuclease resistance, lipophilicity, charge, thermal stability, specificity, and reduced immunogenicity. In some embodiments, the structure of the glutathione-sensitive moiety can be engineered to modify the kinetics of its release.

[0468] In some embodiments, a glutathione-sensitive moiety is attached to the sugar of the nucleotide. In some embodiments, a glutathione-sensitive moiety is attached to the 2′-carbon of the sugar of a modified nucleotide. In some embodiments, the glutathione-sensitive moiety is located at the 5′-carbon of a sugar, particularly when the modified nucleotide is the 5′-terminal nucleotide of the oligonucleotide. In some embodiments, the glutathione-sensitive moiety is located at the 3′-carbon of sugar, particularly when the modified nucleotide is the 3′-terminal nucleotide of the oligonucleotide. In some embodiments, the glutathione-sensitive moiety comprises a sulfonyl group. See, e.g., U.S. Provisional Patent Application No. 62/378,635, entitled Compositions Comprising Reversibly Modified Oligonucleotides and Uses Thereof which was filed on Aug. 23, 2016.

### Oligonucleotide Inhibitors of STAT3

[0469] In some aspects, the disclosure provides, inter alia, oligonucleotides that reduce or inhibit STAT3 expression. In some embodiments, an oligonucleotide that inhibits STAT3 expression herein is targeted to a STAT3 mRNA. The sequence of human STAT3 mRNA (NM_001369512.1) is set forth as SEQ ID NO: 85 or NM_139276.3 (SEQ ID NO: 1217). STAT3 is a known target for conventional cancer therapies.

[0470] The tolerogenic activities of MDSCs are controlled by an oncogenic transcription factor, signal transducer and activator of transcription 3 (STAT3) (Su et al., INT J. MOL SCI (2018) 19(6): 1803). STAT3 is also known to be highly expressed across a range of cancer types and in in vitro and in vivo preclinical models (Huynh et al., NAT. REV. CANCER (2019) 19: 82-96). The inhibition of STAT3 leads to the selective apoptosis of tumor cells and tumor growth inhibition through modulation of downstream target genes (Wang et al., INTERNATIONAL JOURNAL OF BIOLOGICAL SCIENCES, 15(3): 668-79 (2019)). STAT3 is of particular interest in immuno-oncology due to its well documented contributions to an immunosuppressive tumor microenvironment. STAT3 contributes to an immunosuppressive tumor microenvironment by upregulating the inhibitory receptor expressed by T-cells, and via expression of its ligand (PD-1/PD-L1), through increased secretion of IFNγ ((Bu et al., JOURNAL OF DENTAL RESEARCH, 96(9): 1027-34 (2017)). It has long been known that inhibition of STAT3 signaling in antigen presenting cells (APCs) results in priming of antigen-specific CD4+ T cells in response to otherwise tolerogenic stimuli (Cheng et al., IMMUNITY, 19: 425-36 (2003)). In addition, phosphorylated STAT3 on MDSCs directly contributes to the modulation of the suppressive tumor microenvironment by regulating suppressive components such as the amino acid arginine, through transcriptional control (Vasques-Dunndel et al., J. CLIN. INVEST., 15(3): 668-79 (2013)). Over the years several methodologies have been explored to therapeutically target STAT3. While direct targeting of the protein is attractive, the true target is a protein-protein interaction that has been held up as an example of an ‘undruggable’ target due historical data showing that multiple classes of compounds have failed to effectively inhibit its activity (Lau et al., CANCERS (2019) 11(11): 1681, Zou et al., MOL CANCER (2020) 19: 145). In addition, ubiquitous expression of STAT3 across several tissues have led to concerns about severe on-target toxicities (Wong et al., EXPERT OPINION ON INVESTIGATIONAL DRUGS, 26 (8):883-87 (2017), (Kortylewski et al., CANCER IMMUNOL IMMUNOTHER (2017) 66(8): 979-88).

### STAT3 Target Sequences

[0471] In some embodiments, the oligonucleotide is targeted to a target sequence comprising a STAT3 mRNA. In some embodiments, the oligonucleotide, or a portion, fragment, or strand thereof (e.g., an antisense strand or a guide strand of a dsRNA) binds or anneals to a target sequence comprising a STAT3 mRNA, thereby inhibiting STAT3 expression. In some embodiments, the oligonucleotide is targeted to a STAT3 target sequence for the purpose of inhibiting STAT3 expression in vivo. In some embodiments, the amount or extent of inhibition of STAT3 expression by an oligonucleotide targeted to a STAT3 target sequence correlates with the potency of the oligonucleotide. In some embodiments, the amount or extent of inhibition of STAT3 expression by an oligonucleotide targeted to a STAT3 target sequence correlates with the amount or extent of therapeutic benefit in a subject or patient having a disease, disorder or condition associated with the expression of STAT3 treated with the oligonucleotide.

[0472] Through examination of the nucleotide sequence of mRNAs encoding STAT3, including mRNAs of multiple different species (e.g., human, cynomolgus monkey, mouse, and rat; see, e.g., Example 11) and as a result of in vitro and in vivo testing (see, e.g., Example 12 and Example 13), it has been discovered that certain nucleotide sequences of STAT3 mRNA are more amenable than others to oligonucleotide-based inhibition and are thus useful as target sequences for the oligonucleotides herein. In some embodiments, a sense strand of an oligonucleotide (e.g., a dsRNA) described herein comprises a STAT3 target sequence. In some embodiments, a portion or region of the sense strand of a dsRNA described herein comprises a STAT3 target sequence. In some embodiments, a STAT3 mRNA target sequence comprises, or consists of, a sequence of SEQ ID NO 85. In some embodiments, a STAT3 mRNA target sequence comprises, or consists of, a sequence of SEQ ID NO: 1217. In some embodiments, a STAT3 mRNA target sequence comprises, or consists of, a sequence of any one of SEQ ID NOs: 89-280. In some embodiments, a STAT3 mRNA target sequence comprises, or consists of, the sequence set forth in SEQ ID NO: 108. In some embodiments, a STAT3 mRNA target sequence comprises, or consists of, the sequence set forth in SEQ ID NO: 140. In some embodiments, a STAT3 mRNA target sequence comprises, or consists of, the sequence set forth in SEQ ID NO: 141. In some embodiments, a STAT3 mRNA target sequence comprises, or consists of, the sequence set forth in SEQ ID NO: 147.

### STAT3 Targeting Sequences

[0473] In some embodiments, the oligonucleotides herein have regions of complementarity to STAT3 mRNA (e.g., within a target sequence of STAT3 mRNA) for purposes of targeting the mRNA in cells and reducing or inhibiting its expression. In some embodiments, the oligonucleotides herein comprise a STAT3 targeting sequence (e.g., an antisense strand or a guide strand of a dsRNA) having a region of complementarity that binds or anneals to a STAT3 target sequence by complementary (Watson-Crick) base pairing. The targeting sequence or region of complementarity is generally of a suitable length and base content to enable binding or annealing of the oligonucleotide (or a strand thereof) to a STAT3 mRNA for purposes of inhibiting its expression. In some embodiments, the targeting sequence or region of complementarity is at least about 12, at least about 13, at least about 14, at least about 15, at least about 16, at least about 17, at least about 18, at least about 19, at least about 20, at least about 21, at least about 22, at least about 23, at least about 24, at least about 25, at least about 26, at least about 27, at least about 28, at least about 29 or at least about 30 nucleotides in length. In some embodiments, the targeting sequence or region of complementarity is about 12 to about 30 (e.g., 12 to 30, 12 to 22, 15 to 25, 17 to 21, 18 to 27, 19 to 27, or 15 to 30) nucleotides in length. In some embodiments, the targeting sequence or region of complementarity is about 12, 13, 14, 15, 16, 17, 18, 19, 20, 21, 22, 23, 24, 25, 26, 27, 28, 29 or 30 nucleotides in length. In some embodiments, the targeting sequence or region of complementarity is 18 nucleotides in length. In some embodiments, the targeting sequence or region of complementarity is 19 nucleotides in length. In some embodiments, the targeting sequence or region of complementarity is 20 nucleotides in length. In some embodiments, the targeting sequence or region of complementarity is 21 nucleotides in length. In some embodiments, the targeting sequence or region of complementarity is 22 nucleotides in length. In some embodiments, the targeting sequence or region of complementarity is 23 nucleotides in length. In some embodiments, the targeting sequence or region of complementarity is 24 nucleotides in length. In some embodiments, an oligonucleotide comprises a target sequence or region of complementarity complementary to a sequence of any one of SEQ ID NOs: 89-280, and the targeting sequence or region of complementarity is 18 nucleotides in length. In some embodiments, an oligonucleotide comprises a target sequence or region of complementarity complementary to a sequence of any one of SEQ ID NOs: 89-280, and the targeting sequence or region of complementarity is 19 nucleotides in length. In some embodiments, an oligonucleotide comprises a target sequence or region of complementarity complementary to a sequence of any one of SEQ ID NOs: 473-664, and the targeting sequence or region of complementarity is 20 nucleotides in length. In some embodiments, an oligonucleotide comprises a targeting sequence or region of complementarity complementary to a sequence of any one of SEQ ID NOs: 473-664, and the targeting sequence or region of complementarity is 21 nucleotides in length. In some embodiments, an oligonucleotide comprises a targeting sequence or region of complementarity complementary to a sequence of any one of SEQ ID NOs: 473-664, and the targeting sequence or region of complementarity is 22 nucleotides in length. In some embodiments, an oligonucleotide comprises a targeting sequence or region of complementarity complementary to a sequence of any one of SEQ ID NOs: 473-664, and the targeting sequence or region of complementarity is 23 nucleotides in length. In some embodiments, an oligonucleotide comprises a targeting sequence or region of complementarity complementary to a sequence of any one of SEQ ID NOs: 473-664 and the targeting sequence or region of complementarity is 24 nucleotides in length.

[0474] In some embodiments, an oligonucleotide herein comprises a targeting sequence or a region of complementarity (e.g., an antisense strand or a guide strand of a double-stranded oligonucleotide) that is fully complementary to a STAT3 target sequence. In some embodiments, the targeting sequence or region of complementarity is partially complementary to a STAT3 target sequence. In some embodiments, the oligonucleotide comprises a targeting sequence or region of complementarity that is fully complementary to a sequence of STAT3 or STAT3. In some embodiments, the oligonucleotide comprises a targeting sequence or region of complementarity that is partially complementary to a sequence of STAT3 or STAT3.

[0475] In some embodiments, the oligonucleotide comprises a targeting sequence or region of complementarity that is fully complementary to a sequence of any one of SEQ ID NOs: 89-280. In some embodiments, the oligonucleotide comprises a targeting sequence or region of complementarity that is fully complementary to the sequence set forth in SEQ ID NOs: 108, 140, 141, and 147. In some embodiments, the oligonucleotide comprises a targeting sequence or region of complementarity that is partially complementary to a sequence of any one of SEQ ID NOs: 89-280. In some embodiments, the oligonucleotide comprises a targeting sequence or region of complementarity that is partially complementary to the sequence set forth in SEQ ID NOs: 108, 140, 141, and 147.

[0476] In some embodiments, the oligonucleotide herein comprises a targeting sequence or region of complementarity that is complementary to a contiguous sequence of nucleotides comprising a STAT3 mRNA, wherein the contiguous sequence of nucleotides is about 12 to about 30 nucleotides in length (e.g., 12 to 30, 12 to 28, 12 to 26, 12 to 24, 12 to 20, 12 to 18, 12 to 16, 14 to 22, 16 to 20, 18 to 20 or 18 to 19 nucleotides in length). In some embodiments, the oligonucleotide comprises a targeting sequence or region of complementarity that is complementary to a contiguous sequence of nucleotides comprising a STAT3 mRNA, wherein the contiguous sequence of nucleotides is 10, 11, 12, 13, 14, 15, 16, 17, 18, 19 or 20 nucleotides in length. In some embodiments, the oligonucleotide comprises a targeting sequence or region of complementarity that is complementary to a contiguous sequence of nucleotides comprising a STAT3 mRNA, wherein the contiguous sequence of nucleotides is 19 nucleotides in length.

[0477] In some embodiments, an oligonucleotide herein (e.g., an RNAi oligonucleotide) comprises a targeting sequence or a region of complementary that is complementary to a contiguous sequence of nucleotides of any one of SEQ ID NOs: 89-280, optionally wherein the contiguous sequence of nucleotides is 19 nucleotides in length. In some embodiments, the oligonucleotide comprises a targeting sequence or a region of complementary that is complementary to a contiguous sequence of nucleotides of any one of SEQ ID NOs: 108, 140, 141, and 147, wherein the contiguous sequence of nucleotides is 19 nucleotides in length. In some embodiments, the oligonucleotide comprises a targeting sequence or a region of complementary that is complementary to a contiguous sequence of nucleotides of any one of SEQ ID NOs: 473-664, wherein the contiguous sequence of nucleotides is 20 nucleotides in length. In some embodiments, the oligonucleotide comprises a targeting sequence or a region of complementary that is complementary to a contiguous sequence of nucleotides of any one of SEQ ID NOs: 492, 524, 525, and 531, wherein the contiguous sequence of nucleotides is 20 nucleotides in length.

[0478] In some embodiments, a targeting sequence or region of complementarity of an oligonucleotide that is complementary to contiguous nucleotides of STAT3 or STAT3 target sequence spans the entire length of an antisense strand. In some embodiments, a region of complementarity of an oligonucleotide that is complementary to contiguous nucleotides of STAT3 or STAT3 target sequence spans a portion of the entire length of an antisense strand. In some embodiments, an oligonucleotide herein comprises a region of complementarity (e.g., on an antisense strand of a dsRNA) that is at least partially (e.g., fully) complementary to a contiguous stretch of nucleotides spanning nucleotides 1-20 of a target sequence of STAT3 or STAT3.

[0479] In some embodiments, a targeting sequence or region of complementarity of an oligonucleotide herein (e.g., an RNAi oligonucleotide) is complementary to a contiguous sequence of nucleotides of any one of SEQ ID NOs: 89-280 and spans the entire length of an antisense strand. In some embodiments, a targeting sequence or region of complementarity of the oligonucleotide is complementary to a contiguous sequence of nucleotides of SEQ ID NOs: 89-280 and spans a portion of the entire length of an antisense strand. In some embodiments, an oligonucleotide herein (e.g., an RNAi oligonucleotide) comprises a region of complementarity (e.g., on an antisense strand of a dsRNA) that is at least partially (e.g., fully) complementary to a contiguous stretch of nucleotides spanning nucleotides 1-19 or 1-20 of a sequence as set forth in any one of SEQ ID NOs: 473-664.

[0480] In some embodiments, an oligonucleotide herein comprises a targeting sequence or region of complementarity having one or more bp mismatches with the corresponding STAT3 target sequence. In some embodiments, the targeting sequence or region of complementarity may have up to about 1, up to about 2, up to about 3, up to about 4, up to about 5, etc. mismatches with the corresponding STAT3 target sequence provided that the ability of the targeting sequence or region of complementarity to bind or anneal to the STAT3 mRNA under appropriate hybridization conditions and/or the ability of the oligonucleotide to inhibit STAT3 expression is maintained. Alternatively, the targeting sequence or region of complementarity may have no more than 1, no more than 2, no more than 3, no more than 4, or no more than 5 mismatches with the corresponding STAT3 target sequence provided that the ability of the targeting sequence or region of complementarity to bind or anneal to the STAT3 mRNA under appropriate hybridization conditions and/or the ability of the oligonucleotide to inhibit STAT3 expression is maintained. In some embodiments, the oligonucleotide comprises a targeting sequence or region of complementarity having 1 mismatch with the corresponding target sequence. In some embodiments, the oligonucleotide comprises a targeting sequence or region of complementarity having 2 mismatches with the corresponding target sequence. In some embodiments, the oligonucleotide comprises a targeting sequence or region of complementarity having 3 mismatches with the corresponding target sequence. In some embodiments, the oligonucleotide comprises a targeting sequence or region of complementarity having 4 mismatches with the corresponding target sequence. In some embodiments, the oligonucleotide comprises a targeting sequence or region of complementarity having 5 mismatches with the corresponding target sequence. In some embodiments, the oligonucleotide comprises a targeting sequence or region of complementarity more than one mismatch (e.g., 2, 3, 4, 5 or more mismatches) with the corresponding target sequence, wherein at least 2 (e.g., all) of the mismatches are positioned consecutively (e.g., 2, 3, 4, 5 or more mismatches in a row), or where in the mismatches are interspersed throughout the targeting sequence or region of complementarity. In some embodiments, the oligonucleotide comprises a targeting sequence or a region of complementary that is complementary to a contiguous sequence of nucleotides of any one of SEQ ID NOs: 89-280, wherein the targeting sequence or region of complementarity may have up to about 1, up to about 2, up to about 3, up to about 4, up to about 5, etc. mismatches with the corresponding STAT3 target sequence. In some embodiments, the oligonucleotide comprises a targeting sequence or a region of complementary that is complementary to a contiguous sequence of nucleotides of any one of SEQ ID NOs: 89-280, wherein the targeting sequence or region of complementarity may have no more than 1, no more than 2, no more than 3, no more than 4, or no more than 5 mismatches with the corresponding STAT3 target sequence. In some embodiments, the oligonucleotide comprises a targeting sequence or a region of complementary that is complementary to a contiguous sequence of nucleotides of any one of SEQ ID NOs: 108, 140, 141, and 147, wherein the targeting sequence or region of complementarity may have up to about 1, up to about 2, up to about 3, up to about 4, up to about 5, etc. mismatches with the corresponding STAT3 target sequence. In some embodiments, the oligonucleotide comprises a targeting sequence or a region of complementary that is complementary to a contiguous sequence of nucleotides of any one of SEQ ID NOs: 108, 140, 141, and 147, wherein the targeting sequence or region of complementarity may have no more than 1, no more than 2, no more than 3, no more than 4, or no more than 5 mismatches with the corresponding STAT3 target sequence.

### Targeting Ligands

[0481] In some embodiments, it is desirable to target the STAT3 targeting oligonucleotides of the disclosure to one or more cells or one or more organs. Such a strategy can help to avoid undesirable effects in other organs or avoid undue loss of the oligonucleotide to cells, tissue or organs that would not benefit from the oligonucleotide. Targeting of oligonucleotides to one or more cells or one or more organs can be achieved through a variety of approaches. Conjugation of oligonucleotides to tissue or cell specific antibodies, small molecules or targeting ligands can facilitate delivery to and modify accumulation of the oligonucleotide in one or more target cells or tissues (Chernolovskaya et al., (2019) FRONT PHARMACOL. 10:444). For example, conjugation of an oligonucleotide to a saturated fatty acid (e.g., C22) may facilitate delivery to cells or tissues like adipose tissue or immune cells which uptake such ligands more readily than conventional oligonucleotide ligands. Accordingly, in some embodiments, oligonucleotides disclosed herein are modified to facilitate targeting and/or delivery of a tissue, cell, or organ (e.g., to facilitate delivery of the oligonucleotide to the liver). In certain embodiments, oligonucleotides disclosed herein are modified to facilitate delivery of the oligonucleotide to cells of the immune system. In certain embodiments, oligonucleotides disclosed herein are modified to facilitate delivery of the oligonucleotide to myeloid derived suppressor cells. In some embodiments, an oligonucleotide comprises at least one nucleotide (e.g., 1, 2, 3, 4, 5, 6 or more nucleotides) conjugated to one or more targeting ligand(s).

[0482] In some embodiments, the targeting ligand comprises a carbohydrate, amino sugar, cholesterol, peptide, polypeptide, protein, or part of a protein (e.g., an antibody or antibody fragment), or lipid. In some embodiments, the targeting ligand is an aptamer. For example, a targeting ligand may be an RGD peptide that is used to target tumor vasculature or glioma cells, CREKA peptide to target tumor vasculature or stoma, transferring, lactoferrin, or an aptamer to target transferrin receptors expressed on CNS vasculature, or an anti-EGFR antibody to target EGFR on glioma cells. In certain embodiments, the targeting ligand is one or more GalNAc moieties.

[0483] In some embodiments, 1 or more (e.g., 1, 2, 3, 4, 5 or 6) nucleotides of an oligonucleotide are each conjugated to a separate targeting ligand. In some embodiments, 2 to 4 nucleotides of an oligonucleotide are each conjugated to a separate targeting ligand. In some embodiments, targeting ligands are conjugated to 2 to 4 nucleotides at either ends of the sense or antisense strand (e.g., targeting ligands are conjugated to a 2 to 4 nucleotide overhang or extension on the 5′ or 3′ end of the sense or antisense strand) such that the targeting ligands resemble bristles of a toothbrush and the oligonucleotide resembles a toothbrush. For example, an oligonucleotide may comprise a stem-loop at either the 5′ or 3′ end of the sense strand and 1, 2, 3 or 4 nucleotides of the loop of the stem may be individually conjugated to a targeting ligand. In some embodiments, an oligonucleotide (e.g., a dsRNA) provided by the disclosure comprises a stem-loop at the 3′ end of the sense strand, wherein the loop of the stem-loop comprises a triloop or a tetraloop, and wherein the 3 or 4 nucleotides comprising the triloop or tetraloop, respectfully, are individually conjugated to a targeting ligand. In some embodiments, an oligonucleotide provided by the disclosure (e.g., a RNAi oligonucleotide) comprises a stem-loop at the 3′ terminus of the sense strand, wherein the loop of the stem-loop comprises a tetraloop, and wherein 3 nucleotides of the tetraloop are individually conjugated to a targeting ligand.

[0484] GalNAc is a high affinity ligand for the ASGPR, which is primarily expressed on the sinusoidal surface of hepatocyte cells and has a major role in binding, internalizing and subsequent clearing circulating glycoproteins that contain terminal galactose or GalNAc residues (asialoglycoproteins). Conjugation (either indirect or direct) of GalNAc moieties to oligonucleotides of the instant disclosure can be used to target these oligonucleotides to the ASGPR expressed on cells. In some embodiments, an oligonucleotide of the instant disclosure is conjugated to at least one or more GalNAc moieties, wherein the GalNAc moieties target the oligonucleotide to an ASGPR expressed on human liver cells (e.g., human hepatocytes). In some embodiments, the GalNAc moiety target the oligonucleotide to the liver.

[0485] In some embodiments, an oligonucleotide of the instant disclosure is conjugated directly or indirectly to a monovalent GalNAc. In some embodiments, the oligonucleotide is conjugated directly or indirectly to more than one monovalent GalNAc (i.e., is conjugated to 2, 3 or 4 monovalent GalNAc moieties, and is typically conjugated to 3 or 4 monovalent GalNAc moieties). In some embodiments, an oligonucleotide is conjugated to one or more bivalent GalNAc, trivalent GalNAc or tetravalent GalNAc moieties.

[0486] In some embodiments, 1 or more (e.g., 1, 2, 3, 4, 5 or 6) nucleotides of an oligonucleotide are each conjugated to a GalNAc moiety. In some embodiments, 2 to 4 nucleotides of a tetraloop are each conjugated to a separate GalNAc. In some embodiments, 1 to 3 nucleotides of a triloop are each conjugated to a separate GalNAc. In some embodiments, targeting ligands are conjugated to 2 to 4 nucleotides at either ends of the sense or antisense strand (e.g., ligands are conjugated to a 2 to 4 nucleotide overhang or extension on the 5′ or 3′ end of the sense or antisense strand) such that the GalNAc moieties resemble bristles of a toothbrush and the oligonucleotide resembles a toothbrush. In some embodiments, GalNAc moieties are conjugated to a nucleotide of the sense strand. For example, 4 GalNAc moieties can be conjugated to nucleotides in the tetraloop of the sense strand where each GalNAc moiety is conjugated to 1 nucleotide.

[0487] In some embodiments, the tetraloop is any combination of adenine and guanine nucleotides.

[0488] In some embodiments, the tetraloop (tetraL) has a monovalent GalNAc moiety attached to any one or more guanine nucleotides of the tetraloop via any linker described herein, as depicted below in Chem 2 (X=heteroatom):

[chemical structure]

[0489] In some embodiments, the tetraloop (tetraL) has a monovalent GalNAc attached to any one or more adenine nucleotides of the tetraloop via any linker described herein, as depicted below in Chem 3 (X=heteroatom):

[chemical structure]

[0490] In some embodiments, an oligonucleotide herein comprises a monovalent GalNAc attached to a guanine nucleotide referred to as [ademG-GalNAc] or 2′-aminodiethoxymethanol-Guanine-GalNAc, as depicted below in Chem 4:

[chemical structure]

[0491] In some embodiments, an oligonucleotide herein comprises a monovalent GalNAc attached to an adenine nucleotide, referred to as [ademA-GalNAc] or 2′-aminodiethoxymethanol-Adenine-GalNAc, as depicted below in Chem 5:

[chemical structure]

[0492] An example of such conjugation is shown below (Chem 6) for a loop comprising from 5′ to 3′ the nucleotide sequence GAAA (L=linker, X=heteroatom) stem attachment points are shown. Such a loop may be present, for example, at positions 27-30 of the sense strand as shown in FIG. 1. In the chemical formula,

[chemical structure]

is used to describe an attachment point to the oligonucleotide strand (Chem 6).

[chemical structure]

[0493] Appropriate methods or chemistry (e.g., click chemistry) can be used to link a targeting ligand to a nucleotide. In some embodiments, a targeting ligand is conjugated to a nucleotide using a click linker. In some embodiments, an acetal-based linker is used to conjugate a targeting ligand to a nucleotide of any one of the oligonucleotides described herein. Acetal-based linkers are disclosed, for example, in Intl. Patent Application Publication No. WO 2016/100401. In some embodiments, the linker is a labile linker. However, in other embodiments, the linker is stable. Examples are shown below for a loop comprising from 5′ to 3′ the nucleotides GAAA, in which GalNAc moieties are attached to nucleotides of the loop using an acetal linker (Chem 7 and Chem 8). Such a loop may be present, for example, at positions 27-30 of the any one of the sense strand as shown in FIG. 1. In the chemical formula,

[chemical structure]

is an attachment point to the oligonucleotide strand (Chem 7 and Chem 8).

[chemical structure]

[chemical structure]

[0494] As mentioned, various appropriate methods or chemistry synthetic techniques (e.g., click chemistry) can be used to link a targeting ligand to a nucleotide. In some embodiments, a targeting ligand is conjugated to a nucleotide using a click linker. In some embodiments, an acetal-based linker is used to conjugate a targeting ligand to a nucleotide of any one of the oligonucleotides described herein. Acetal-based linkers are disclosed, for example, in Intl. Patent Application Publication No. WO 2016/100401. In some embodiments, the linker is a labile linker. However, in other embodiments, the linker is a stable linker.

[0495] In some embodiments, a duplex extension (e.g., of up to 3, 4, 5 or 6 bp in length) is provided between a targeting ligand (e.g., a GalNAc moiety) and a dsRNA. In some embodiments, the oligonucleotides herein do not have a GalNAc conjugated thereto.

### Structure of Conjugated STAT3 Targeting Oligonucleotides

[0496] In some embodiments, a STAT3 targeting oligonucleotide described herein comprises a nucleotide sequence having a region of complementarity to a STAT3 mRNA target sequence and one or more targeting ligands, wherein the nucleotide sequence comprises one or more nucleosides (nucleic acids) conjugated with one or more targeting ligands represented by formula I-a:

[chemical structure]

or a pharmaceutically acceptable salt thereof,
wherein:
[0497] B is a nucleobase or hydrogen;
[0498] R¹ and R² are independently hydrogen, halogen, R^{A}, —CN, —S(O)R, —S(O)₂R, —Si(OR)₂R, —Si(OR)R₂, or —SiR₃; or
   [0499] R¹ and R² on the same carbon are taken together with their intervening atoms to form a 3-7 membered saturated or partially unsaturated ring having 0-3 heteroatoms, independently selected from nitrogen, oxygen, and sulfur;
[0500] each R^{A} is independently an optionally substituted group selected from C₁₋₆ aliphatic, phenyl, a 4-7 membered saturated or partially unsaturated heterocyclic ring having 1-2 heteroatoms independently selected from nitrogen, oxygen, and sulfur, and a 5-6 membered heteroaryl ring having 1-4 heteroatoms independently selected from nitrogen, oxygen, and sulfur;
[0501] each R is independently hydrogen, a suitable protecting group, or an optionally substituted group selected from C₁₋₆ aliphatic, phenyl, a 4-7 membered saturated or partially unsaturated heterocyclic having 1-2 heteroatoms independently selected from nitrogen, oxygen, and sulfur, and a 5-6 membered heteroaryl ring having 1-4 heteroatoms independently selected from nitrogen, oxygen, and sulfur; or
   [0502] two R groups on the same atom are taken together with their intervening atoms to form a 4-7 membered saturated, partially unsaturated, or heteroaryl ring having 0-3 heteroatoms, independently selected from nitrogen, oxygen, silicon, and sulfur;
[0503] each targeting ligand is selected from lipid conjugate moiety (LC), carbohydrate, amino sugar or GalNAc; and wherein each LC is independently a lipid conjugate moiety comprising a saturated or unsaturated, straight, or branched C₁₋₅₀ hydrocarbon chain, wherein 0-10 methylene units of the hydrocarbon chain are independently replaced by -Cy-, —O—, —C(O)NR—, —NR—, —S—, —C(O)—, —C(O)O—, —S(O)—, —S(O)₂—, —P(O)OR—, —P(S)OR—;
[0504] each -Cy- is independently an optionally substituted bivalent ring selected from phenylenyl, an 8-10 membered bicyclic arylenyl, a 4-7 membered saturated or partially unsaturated carbocyclylenyl, a 4-11 membered saturated or partially unsaturated spiro carbocyclylenyl, an 8-10 membered bicyclic saturated or partially unsaturated carbocyclylenyl, a 4-7 membered saturated or partially unsaturated heterocyclylenyl having 1-3 heteroatoms independently selected from nitrogen, oxygen, and sulfur, a 4-11 membered saturated or partially unsaturated spiro heterocyclylenyl having 1-2 heteroatoms independently selected from nitrogen, oxygen, and sulfur, an 8-10 membered bicyclic saturated or partially unsaturated heterocyclylenyl having 1-2 heteroatoms independently selected from nitrogen, oxygen, and sulfur, a 5-6 membered heteroarylenyl having 1-4 heteroatoms independently selected from nitrogen, oxygen, and sulfur, or an 8-10 membered bicyclic heteroarylenyl having 1-5 heteroatoms independently selected from nitrogen, oxygen, or sulfur;
[0505] n is 1-10;
[0506] L is a covalent bond or a bivalent saturated or unsaturated, straight or branched C₁₋₅₀ hydrocarbon chain, wherein 0-10 methylene units of the hydrocarbon chain are independently replaced by -Cy-, —O—, —C(O)NR—, —NR—, —S—, —C(O)—, —C(O)O—, —S(O)—, —S(O)₂—, —P(O)OR—, —P(S)OR—, —V¹CR²W¹—, or

[chemical structure]

[0507] m is 1-50;
[0508] X¹, V¹ and W¹ are independently —C(R)₂—, —OR, —O—, —S—, —Se—, or —NR—;
[0509] Y is hydrogen, a suitable hydroxyl protecting group,

[chemical structure]

[0510] R³ is hydrogen, a suitable protecting group, a suitable prodrug, or an optionally substituted group selected from C₁₋₆ aliphatic, phenyl, a 4-7 membered saturated or partially unsaturated heterocyclic ring having 1-2 heteroatoms independently selected from nitrogen, oxygen, and sulfur, and a 5-6 membered heteroaryl ring having 1-4 heteroatoms independently selected from nitrogen, oxygen, and sulfur;
[0511] X² is O, S, or NR;
[0512] X³ is —O—, —S—, —BH₂—, or a covalent bond;
[0513] Y¹ is a linking group attaching to the 2′- or 3′-terminal of a nucleoside, a nucleotide, or an oligonucleotide;
[0514] Y² is hydrogen, a suitable protecting group, a phosphoramidite analogue, an internucleotide linking group attaching to the 5′-terminal of a nucleoside, a nucleotide, or an oligonucleotide, or a linking group attaching to a solid support; and
[0515] Z is —O—, —S—, —NR—, or —CR₂—.

[0516] In some embodiments, the STAT3 targeting oligonucleotide comprises one or more nucleic acids conjugated with targeting ligands represented by formula II-a:

[chemical structure]

or a pharmaceutically acceptable salt thereof.

[0517] In some embodiments, the STAT3 targeting oligonucleotide comprises one or more nucleic acids conjugated with targeting ligands represented by formula II-b or II-c:

[chemical structure]

or a pharmaceutically acceptable salt thereof, wherein:
[0518] L¹ is a covalent bond, a monovalent or a bivalent saturated or unsaturated, straight or branched C₁₋₅₀ hydrocarbon chain, wherein 0-10 methylene units of the hydrocarbon chain are independently replaced by -Cy-, —O—, —C(O)NR—, —NR—, —S—, —C(O)—, —C(O)O—, —S(O)—, —S(O)₂—, —P(O)OR—, —P(S)OR—, or

[chemical structure]

[0519] R⁴ is hydrogen, R^{A}, or a suitable amine protection group; and
[0520] R⁵ is adamantyl, or a saturated or unsaturated, straight, or branched C₁₋₅₀ hydrocarbon chain, wherein 0-10 methylene units of the hydrocarbon chain are independently replaced by —O—, —C(O)NR—, —NR—, —S—, —C(O)—, —C(O)O—, —S(O)—, —S(O)₂—, —P(O)OR—, or —P(S)OR.

[0521] In some embodiments, R⁵ is selected from

[chemical structure]

[0522] In some embodiments, R⁵ is selected from:

[chemical structure]

[0523] In some embodiments, R⁵ is

[chemical structure]

In some embodiments, R⁵ is

[chemical structure]

In some embodiments, R⁵ is

[chemical structure]

In some embodiments, R⁵ is

[chemical structure]

In some embodiments, R⁵ is

[chemical structure]

In some embodiments, R⁵ is

[chemical structure]

In some embodiments, R⁵ is

[chemical structure]

In some embodiments, R⁵ is

[chemical structure]

In some embodiments, R⁵ is

[chemical structure]

In some embodiments, R⁵ is

[chemical structure]

In some embodiments, R⁵ is

[chemical structure]

In some embodiments, R⁵ is

[chemical structure]

In some embodiments, R⁵ is

[chemical structure]

In some embodiments, R⁵ is

[chemical structure]

[0524] In some embodiments, the STAT3 targeting oligonucleotide comprises one or more nucleic acids conjugated with targeting ligands represented by formula II-Ib or II-Ic:

[chemical structure]

or a pharmaceutically acceptable salt thereof; wherein
[0525] B is a nucleobase or hydrogen;
[0526] m is 1-50;
[0527] X¹ is —O—, or —S—;
[0528] Y is hydrogen,

[chemical structure]

[0529] R³ is hydrogen, or a suitable protecting group;
[0530] X² is O, or S;
[0531] X³ is —O—, —S—, or a covalent bond;
[0532] Y¹ is a linking group attaching to the 2′- or 3′-terminal of a nucleoside, a nucleotide, or an oligonucleotide;
[0533] Y² is hydrogen, a phosphoramidite analogue, an internucleotide linking group attaching to the 5′-terminal of a nucleoside, a nucleotide, or an oligonucleotide, or a linking group attaching to a solid support;
[0534] R⁵ is adamantyl, or a saturated or unsaturated, straight, or branched C₁₋₅₀ hydrocarbon chain, wherein 0-10 methylene units of the hydrocarbon chain are independently replaced by —O—, —C(O)NR—, —NR—, —S—, —C(O)—, —C(O)O—, —S(O)—, —S(O)₂—, —P(O)OR—, or —P(O)OR—; and
[0535] R is hydrogen, a suitable protecting group, or an optionally substituted group selected from C₁₋₆ aliphatic, phenyl, a 4-7 membered saturated or partially unsaturated heterocyclic having 1-2 heteroatoms independently selected from nitrogen, oxygen, and sulfur, and a 5-6 membered heteroaryl ring having 1-4 heteroatoms independently selected from nitrogen, oxygen, and sulfur.

[0536] In some embodiments, R⁵ is selected from

[chemical structure]

[0537] In some embodiments, R⁵ is

[chemical structure]

[0538] In some embodiments, R⁵ is

[chemical structure]

[0539] In some embodiments, the nucleotide sequence of the STAT3 targeting oligonucleotide comprises 1-10 targeting ligands. In some embodiments, the nucleotide sequence comprises 1, 2 or 3 targeting ligands.

[0540] In some embodiments, the STAT3 targeting oligonucleotide is a double-stranded molecule. In some embodiments, the STAT3 targeting oligonucleotide is an RNAi molecule. In some embodiments, the STAT3 targeting double stranded oligonucleotide comprises a stem loop. In some embodiments, the ligand is conjugated to any of the nucleotides in the stem loop. In some embodiments, the ligand is conjugated to the first nucleotide from 5′ to 3′, in the stem loop. In some embodiments, the ligand is conjugated to the second nucleotide from 5′ to 3′ in the stem loop. In some embodiments, the ligand is conjugated to the third nucleotide from 5′ to 3′ in the stem loop. In some embodiments, the ligand is conjugated to the fourth nucleotide from 5′ to 3′ in the stem loop. In some embodiments, the ligand is conjugated to one, two, three, or four of the nucleotides in the stem loop. In some embodiments, the ligand is conjugated to three of the nucleotides in the stem loop.

[0541] In some embodiments, the STAT3 targeting double stranded oligonucleotide comprises a stem loop, wherein one or more lipids are conjugated to one or more nucleotides of the stem loop. In some embodiments, the STAT3 targeting double stranded oligonucleotide comprises a stem loop, wherein one or more C16 lipids are conjugated to one or more nucleotides of the stem loop. In some embodiments, the STAT3 targeting double stranded oligonucleotide comprises a stem loop, wherein one or more C18 lipids are conjugated to one or more nucleotides of the stem loop.

[0542] In some embodiments, the STAT3 targeting oligonucleotide comprises a sense strand of 36 nucleotides with positions numbered 1-36 from 5′ to 3′. In some embodiments, the STAT3 targeting oligonucleotide comprises a lipid conjugated to position 27 of a 36-nucleotide sense strand. In some embodiments, STAT3 targeting oligonucleotide comprises a lipid conjugated to position 28 of a 36-nucleotide sense strand. In some embodiments, the STAT3 targeting oligonucleotide comprises a lipid conjugated to position 29 of a 36-nucleotide sense strand. In some embodiments, the STAT3 targeting oligonucleotide comprises a lipid conjugated to position 30 of a 36-nucleotide sense strand. In some embodiments, a 36-nucleotide sense strand forms a stem loop having a loop with positions 27-30. In some embodiments, a lipid is conjugated to more than one position of the loop (e.g., positions 27 and 28 of a 36-nucleotide sense strand).

[0543] In some embodiments, the STAT3 targeting oligonucleotide comprises a C16 lipid conjugated to position 27 of a 36-nucleotide sense strand. In some embodiments, STAT3 targeting oligonucleotide comprises a C16 lipid conjugated to position 28 of a 36-nucleotide sense strand. In some embodiments, the STAT3 targeting oligonucleotide comprises a C16 lipid conjugated to position 29 of a 36-nucleotide sense strand. In some embodiments, the STAT3 targeting oligonucleotide comprises a C16 lipid conjugated to position 30 of a 36-nucleotide sense strand. In some embodiments, a 36-nucleotide sense strand forms a stem loop having a loop with positions 27-30. In some embodiments, a C16 lipid is conjugated to more than one position of the loop (e.g., positions 27 and 28 of a 36-nucleotide sense strand).

[0544] In some embodiments, the STAT3 targeting oligonucleotide comprises a C18 lipid conjugated to position 27 of a 36-nucleotide sense strand. In some embodiments, STAT3 targeting oligonucleotide comprises a C18 lipid conjugated to position 28 of a 36-nucleotide sense strand. In some embodiments, the STAT3 targeting oligonucleotide comprises a C18 lipid conjugated to position 29 of a 36-nucleotide sense strand. In some embodiments, the STAT3 targeting oligonucleotide comprises a C18 lipid conjugated to position 30 of a 36-nucleotide sense strand. In some embodiments, a 36-nucleotide sense strand forms a stem loop having a loop with positions 27-30. In some embodiments, a C18 lipid is conjugated to more than one position of the loop (e.g., positions 27 and 28 of a 36-nucleotide sense strand).

[0545] In some embodiments, a STAT3 targeting oligonucleotide comprises an antisense strand of 15 to 30 nucleotides and a sense strand of 15 to 40 nucleotide, wherein the sense and antisense strands form a duplex region, wherein the antisense strand comprises a region of complementarity to a STAT3 mRNA target sequence expressed in an immune cell associated with a tumor microenvironment, wherein the sense strand comprises at its 3′ end a stem-loop comprising a tetraloop comprising 4 nucleosides, wherein one or more of the 4 nucleosides is represented by formula II-Ib:

[chemical structure]

wherein B is selected from an adenine and a guanine nucleobase, and wherein R⁵ is a hydrocarbon chain. In some embodiments, m is 1, X1 is O, Y2 is an internucleotide linking group attaching to the 5′ terminal of a nucleoside,

[chemical structure]

Y is represented by Y1 is a linking group attaching to the 2′ or 3′ terminal of a nucleotide, X2 is O, X3 is O, and R3 is H.

[0546] In some embodiments, the hydrocarbon chain is a C8-C30 hydrocarbon chain. In some embodiments, the hydrocarbon chain is a C16 hydrocarbon chain. In some embodiments, the C16 hydrocarbon chain is represented by

[chemical structure]

In some embodiments, the hydrocarbon chain is a C18 hydrocarbon chain. In some embodiments, the C18 hydrocarbon chain is represented by

[chemical structure]

[0547] In some embodiments, the oligonucleotide comprises a sense strand comprising a sequence selected from SEQ ID NOs: 89-280, wherein the sense strand comprises a C18 lipid. In some embodiments, the 4 nucleosides of the tetraloop are numbered 1-4 from 5′ to 3′ and position 1 is represented by formula II-Ib. In some embodiments, position 2 is represented by formula II-Ib. In some embodiments, position 3 is represented by formula II-Ib. In some embodiments, position 4 is represented by formula II-Ib. In some embodiments, the sense strand is 36 nucleotides with positions numbered 1-36 from 5′ to 3′, wherein the stem-loop comprises nucleotides at positions 21-36, and wherein one or more nucleosides at positions 27-30 are represented by formula II-Ib. In some embodiments, the antisense strand is 22 nucleotides.

### Exemplary STAT3 Targeting Oligonucleotides

[0548] In some embodiments, an oligonucleotide targeting STAT3 comprises a sense strand and an antisense strand as set forth in Tables 3, 4, 5, 10, 11, 12, 13, and 14, wherein the oligonucleotide comprises a stem loop structure having a double-stranded stem of about 2-6 base pairs and a loop of 3-4 nucleotides, and wherein the sense and antisense strands comprise the modification pattern set forth in FIG. 1 or Example 12. In some embodiments, an oligonucleotide targeting STAT3 comprises a sense strand and an antisense strand as set forth in Tables 3, 4, 5, 10, 11, 12, 13, and 14, wherein the oligonucleotide comprises a stem loop structure having a double-stranded stem of about 2-6 base pairs and a loop of 3-4 nucleotides, wherein the sense and antisense strands comprise the modification pattern set forth in FIG. 1, and wherein antisense strand is modified with an oxymethylphosphonate at the 4′ carbon of the 5′ terminal nucleotide. In some embodiments, the oligonucleotide comprises a stem loop comprising the nucleotide sequence of SEQ ID NO: 86. In some embodiments, the oligonucleotide comprises a double-stranded stem of 6 base pairs and a stem loop of 4 nucleotides comprising one, two, three or four GalNAc conjugated nucleotides. In some embodiments, the GalNAc conjugated nucleotide is a monovalent GalNAc conjugated to an adenine nucleotide, referred to as [ademA-GalNAc] or 2′-aminodiethoxymethanol-Adenine-GalNAc, as depicted below:

[chemical structure]

[0549] In some embodiments, the stem loop comprises a double-stranded stem of 6 base pairs and a loop comprising the nucleotide sequence GAAA, wherein each adenine nucleotide is ademA-GalNAc.

[0550] In some embodiments, an oligonucleotide for reducing expression of STAT3 mRNA comprises a sense and antisense strand comprising nucleotide sequences selected from:
[0551] (a) SEQ ID NOs: 9 and 10, respectively;
[0552] (b) SEQ ID NOs: 37 and 38, respectively;
[0553] (c) SEQ ID NOs: 65 and 66, respectively; and
[0554] (d) SEQ ID NOs: 69 and 70, respectively.

[0555] In some embodiments, an oligonucleotide for reducing expression of STAT3 mRNA comprises a sense strand and an antisense strand comprising nucleotide sequences selected from:
[0556] (a) SEQ ID NOs: 9 and 10, respectively;
[0557] (b) SEQ ID NOs: 37 and 38, respectively;
[0558] (c) SEQ ID NOs: 65 and 66, respectively; and
[0559] (d) SEQ ID NOs: 69 and 70, respectively,
   wherein the sense and antisense strands are modified based on the pattern below
[0560] Sense Strand:
[0561] [mXs][mX][mX][mX][mX][mX][mX][fX][fX][fX][fX][mX][mX][mX][mX][mX][mX][mX][mX][mX][mX][mX][mX][mX][mX][mX][mX][ademX-C#][mX][mX][mX][mX][mX][mX][mX][mX]
[0562] Hybridized to
[0563] Antisense Strand: [MePhosphonate-4O-mXs][fXs][fX][fX][fX][mX][fX][mX][mX][fX][mX][mX][mX][fX][mX][mX][mX][mX][mX][mXs][mXs][mX]
   (key provided in Table 1). In some embodiments, C # is C16 or C18.

[0564] In some embodiments, an oligonucleotide for reducing expression of STAT3 mRNA comprises a sense strand and an antisense strand comprising nucleotide sequences selected from:
[0565] (a) SEQ ID NOs: 862 and 952, respectively;
[0566] (b) SEQ ID NOs: 875 and 965, respectively;
[0567] (c) SEQ ID NOs: 876 and 966, respectively; and
[0568] (d) SEQ ID NOs: 920 and 1010, respectively,
   wherein the sense and antisense strands are modified based on the pattern below
[0569] Sense Strand:
[0570] [mXs][mX][mX][mX][mX][mX][mX][fX][fX][fX][fX][mX][mX][mX][mX][mX][mX][mX][mX][mX][mX][mX][mX][mX][mX][mX][mX][ademX-C #][mX][mX][mX][mX][mX][mX][mX][mX]
[0571] Hybridized to
[0572] Antisense Strand: [MePhosphonate-4O-mXs][fXs][fX][fX][fX][mX][fX][mX][mX][fX][mX][mX][mX][fX][mX][mX][mX][mX][mX][mXs][mXs][mX]
   (key provided in Table 1). In some embodiments, C # is C16 or C18.

[0573] In some embodiments, an oligonucleotide for reducing expression of STAT3 mRNA comprises a sense strand and an antisense strand comprising nucleotide sequences selected from:
[0574] (a) SEQ ID NOs: 862 and 952, respectively;
[0575] (b) SEQ ID NOs: 875 and 965, respectively;
[0576] (c) SEQ ID NOs: 876 and 966, respectively; and
[0577] (d) SEQ ID NOs: 920 and 1010, respectively,
   wherein the sense and antisense strands are modified based on the pattern below
[0578] Sense Strand:
[0579] [mXs][mX][mX][mX][mX][mX][mX][fX][fX][fX][fX][mX][mX][mX][mX][mX][mX][mX][mX][mX][mX][mX][mX][mX][mX][mX][mX][ademX-C#][mX][mX][mX][mX][mX][mX][mX][mX]
[0580] Hybridized to
[0581] Antisense Strand: [MePhosphonate-4O-mXs][fXs][fXs][fX][fX][mX][fX][mX][mX][fX][mX][mX][mX][fX][mX][mX][mX][mX][mX][mXs][mXs][mX]
   (key provided in Table 1). In some embodiments, C # is C16 or C18.

[0582] In some embodiments, an oligonucleotide for reducing expression of STAT3 mRNA comprises a sense and antisense strand comprising nucleotide sequences selected from:
[0583] (a) SEQ ID NOs: 11 and 12, respectively;
[0584] (b) SEQ ID NOs: 39 and 40, respectively;
[0585] (c) SEQ ID NOs: 67 and 68, respectively; and
[0586] (d) SEQ ID NOs: 71 and 72, respectively.

[0587] In some embodiments, an oligonucleotide for reducing expression of STAT3 mRNA comprises the sequence set forth in SEQ ID NO: 81. In some embodiments, an oligonucleotide for reducing expression of STAT3 mRNA comprises the sequence set forth in SEQ ID NO: 82. In some embodiments, an oligonucleotide for reducing expression of STAT3 mRNA comprises the sequence set forth in SEQ ID NO: 83. In some embodiments, an oligonucleotide for reducing expression of STAT3 mRNA comprises the sequence set forth in SEQ ID NO: 84.

[0588] In some embodiments, an oligonucleotide for reducing expression of STAT3 mRNA comprises a sense and antisense strand having nucleotide sequences set forth in SEQ ID NOs: 87 and 68, respectively. In some embodiments, an oligonucleotide for reducing expression of STAT3 mRNA comprises a sense and antisense strand having nucleotide sequences set forth in SEQ ID NOs: 88 and 71, respectively.

[0589] In some embodiments, an oligonucleotide for reducing expression of STAT3 mRNA comprises a sense strand sequence selected from SEQ ID NOs: 89-280. In some embodiments, an oligonucleotide for reducing expression of STAT3 mRNA comprises a sense strand sequence selected from SEQ ID NOs: 857-946. In some embodiments, an oligonucleotide for reducing expression of STAT3 mRNA comprises a sense strand sequence selected from SEQ ID NOs: 857-888. In some embodiments, an oligonucleotide for reducing expression of STAT3 mRNA comprises a sense strand sequence selected from SEQ ID NOs: 889-912. In some embodiments, an oligonucleotide for reducing expression of STAT3 mRNA comprises a sense strand sequence selected from SEQ ID NOs: 913-934. In some embodiments, an oligonucleotide for reducing expression of STAT3 mRNA comprises a sense strand sequence selected from SEQ ID NOs: 935-946.

[0590] In some embodiments, an oligonucleotide for reducing expression of STAT3 mRNA comprises an antisense strand sequence selected from SEQ ID NOs: 947-1036. In some embodiments, an oligonucleotide for reducing expression of STAT3 mRNA comprises an antisense strand sequence selected from SEQ ID NOs: 947-978. In some embodiments, an oligonucleotide for reducing expression of STAT3 mRNA comprises an antisense strand sequence selected from SEQ ID NOs: 979-1002. In some embodiments, an oligonucleotide for reducing expression of STAT3 mRNA comprises an antisense strand sequence selected from SEQ ID NOs: 1003-1024. In some embodiments, an oligonucleotide for reducing expression of STAT3 mRNA comprises an antisense strand sequence selected from SEQ ID NOs: 1025-1036.

[0591] In some embodiments, an oligonucleotide for reducing expression of STAT3 mRNA comprises a sense strand sequence selected from SEQ ID NOs: 857-946 and an antisense strand selected from SEQ ID NOs: 947-1036. In some embodiments, an oligonucleotide for reducing expression of STAT3 mRNA comprises a sense strand sequence selected from SEQ ID NOs: 857-888 and an antisense strand selected from SEQ ID NOs: 947-978. In some embodiments, an oligonucleotide for reducing expression of STAT3 mRNA comprises a sense strand sequence selected from SEQ ID NOs: 889-912 and an antisense strand selected from SEQ ID NOs: 979-1002. In some embodiments, an oligonucleotide for reducing expression of STAT3 mRNA comprises a sense strand sequence selected from SEQ ID NOs: 913-934 and an antisense strand selected from SEQ ID NOs:1003-1024. In some embodiments, an oligonucleotide for reducing expression of STAT3 mRNA comprises a sense strand sequence selected from SEQ ID NOs: 935-946 and an antisense strand selected from SEQ ID NOs:1025-1036.

[0592] In some embodiments, an oligonucleotide for reducing expression of STAT3 mRNA comprises a sense strand sequence selected from SEQ ID NOs: 1037-1126. In some embodiments, an oligonucleotide for reducing expression of STAT3 mRNA comprises a sense strand sequence selected from SEQ ID NOs: 1037-1068. In some embodiments, an oligonucleotide for reducing expression of STAT3 mRNA comprises a sense strand sequence selected from SEQ ID NOs:1069-1092. In some embodiments, an oligonucleotide for reducing expression of STAT3 mRNA comprises a sense strand sequence selected from SEQ ID NOs: 1093-1114. In some embodiments, an oligonucleotide for reducing expression of STAT3 mRNA comprises a sense strand sequence selected from SEQ ID NOs:1115-1126.

[0593] In some embodiments, an oligonucleotide for reducing expression of STAT3 mRNA comprises an antisense strand sequence selected from SEQ ID NOs: 1127-1216. In some embodiments, an oligonucleotide for reducing expression of STAT3 mRNA comprises an antisense strand sequence selected from SEQ ID NOs: 1127-1158. In some embodiments, an oligonucleotide for reducing expression of STAT3 mRNA comprises an antisense strand sequence selected from SEQ ID NOs: 1159-1182. In some embodiments, an oligonucleotide for reducing expression of STAT3 mRNA comprises an antisense strand sequence selected from SEQ ID NOs:1183-1204. In some embodiments, an oligonucleotide for reducing expression of STAT3 mRNA comprises an antisense strand sequence selected from SEQ ID NOs:1205-1216.

[0594] In some embodiments, an oligonucleotide for reducing expression of STAT3 mRNA comprises a sense strand sequence selected from SEQ ID NOs: 1037-1126 and an antisense strand selected from SEQ ID NOs: 1127-1216. In some embodiments, an oligonucleotide for reducing expression of STAT3 mRNA comprises a sense strand sequence selected from SEQ ID NOs: 1037-1068 and an antisense strand selected from SEQ ID NOs: 1127-1182. In some embodiments, an oligonucleotide for reducing expression of STAT3 mRNA comprises a sense strand sequence selected from SEQ ID NOs: 1069-1092 and an antisense strand selected from SEQ ID NOs: 1159-1182. In some embodiments, an oligonucleotide for reducing expression of STAT3 mRNA comprises a sense strand sequence selected from SEQ ID NOs: 1093-1114 and an antisense strand selected from SEQ ID NOs:1183-1204. In some embodiments, an oligonucleotide for reducing expression of STAT3 mRNA comprises a sense strand sequence selected from SEQ ID NOs: 1115-1126 and an antisense strand selected from SEQ ID NOs:1205-1216.

[0595] In some embodiments, an oligonucleotide for reducing expression of STAT3 mRNA comprises a sense and antisense strand comprising nucleotide sequences selected from:
[0596] (a) SEQ ID NOs: 857 and 947, respectively;
[0597] (b) SEQ ID NOs: 858 and 948, respectively;
[0598] (c) SEQ ID NOs: 859 and 949, respectively;
[0599] (d) SEQ ID NOs: 860 and 950, respectively;
[0600] (e) SEQ ID NOs: 862 and 952, respectively;
[0601] (f) SEQ ID NOs: 867 and 957, respectively;
[0602] (g) SEQ ID NOs: 875 and 965, respectively; and
[0603] (h) SEQ ID NOs: 876 and 966, respectively.

[0604] In some embodiments, an oligonucleotide for reducing expression of STAT3 mRNA comprises a sense and antisense strand comprising nucleotide sequences selected from:
[0605] (a) SEQ ID NOs: 901 and 991, respectively;
[0606] (b) SEQ ID NOs: 910 and 1000, respectively;
[0607] (c) SEQ ID NOs: 899 and 989, respectively;
[0608] (d) SEQ ID NOs: 896 and 986, respectively;
[0609] (e) SEQ ID NOs: 892 and 982, respectively;
[0610] (f) SEQ ID NOs: 890 and 980, respectively; and
[0611] (g) SEQ ID NOs: 889 and 979, respectively.

[0612] In some embodiments, an oligonucleotide for reducing expression of STAT3 mRNA comprises a sense and antisense strand comprising nucleotide sequences selected from:
[0613] (a) SEQ ID NOs: 940 and 1030, respectively;
[0614] (b) SEQ ID NOs: 937 and 1027, respectively; and
[0615] (c) SEQ ID NOs: 939 and 1029, respectively.

[0616] In some embodiments, an oligonucleotide for reducing expression of STAT3 mRNA comprises a sense and antisense strand comprising nucleotide sequences selected from:
[0617] (a) SEQ ID NOs: 915 and 1005, respectively;
[0618] (b) SEQ ID NOs: 924 and 1014, respectively;
[0619] (c) SEQ ID NOs: 913 and 1003, respectively; and
[0620] (d) SEQ ID NOs: 920 and 1010, respectively.

[0621] In some embodiments, an oligonucleotide for reducing expression of STAT3 mRNA comprises a sense and antisense strand comprising nucleotide sequences selected from:
[0622] (a) SEQ ID NOs: 862 and 952, respectively;
[0623] (b) SEQ ID NOs: 875 and 965, respectively;
[0624] (c) SEQ ID NOs: 876 and 966, respectively; and
[0625] (d) SEQ ID NOs: 920 and 1010, respectively.

[0626] In some embodiments, the sense strand comprises the sequence of SEQ ID NO: 862 and the antisense strand comprises the sequence of SEQ ID NO: 952.

[0627] In some embodiments, the sense strand comprises the sequence of SEQ ID NO: 875 and the antisense strand comprises the sequence of SEQ ID NO: 965.

[0628] In some embodiments, the sense strand comprises the sequence of SEQ ID NO: 876 and the antisense strand comprises the sequence of SEQ ID NO: 966.

[0629] In some embodiments, the sense strand comprises the sequence of SEQ ID NO: 920 and the antisense strand comprises the sequence of SEQ ID NO: 1010.

[0630] In some embodiments, an oligonucleotide for reducing expression of STAT3 mRNA comprises a sense and antisense strand comprising nucleotide sequences selected from:
[0631] (a) SEQ ID NOs: 1037 and 1127, respectively;
[0632] (b) SEQ ID NOs: 1038 and 1128, respectively;
[0633] (c) SEQ ID NOs: 1039 and 1129, respectively;
[0634] (d) SEQ ID NOs: 1040 and 1130, respectively;
[0635] (e) SEQ ID NOs: 1042 and 1132, respectively;
[0636] (f) SEQ ID NOs: 1047 and 1137, respectively;
[0637] (g) SEQ ID NOs: 1055 and 1145, respectively; and
[0638] (h) SEQ ID NOs: 1056 and 1146, respectively.

[0639] In some embodiments, an oligonucleotide for reducing expression of STAT3 mRNA comprises a sense and antisense strand comprising nucleotide sequences selected from:
[0640] (a) SEQ ID NOs: 1081 and 1171, respectively;
[0641] (b) SEQ ID NOs: 1090 and 1180, respectively;
[0642] (c) SEQ ID NOs: 1079 and 1169, respectively;
[0643] (d) SEQ ID NOs: 1076 and 1166, respectively;
[0644] (e) SEQ ID NOs: 1072 and 1162, respectively;
[0645] (f) SEQ ID NOs: 1070 and 1160, respectively; and
[0646] (g) SEQ ID NOs: 1069 and 1159, respectively.

[0647] In some embodiments, an oligonucleotide for reducing expression of STAT3 mRNA comprises a sense and antisense strand comprising nucleotide sequences selected from:
[0648] (a) SEQ ID NOs: 1120 and 1210, respectively;
[0649] (c) SEQ ID NOs: 1119 and 1209, respectively.

[0650] In some embodiments, an oligonucleotide for reducing expression of STAT3 mRNA comprises a sense and antisense strand comprising nucleotide sequences selected from:
[0651] (a) SEQ ID NOs: 1095 and 1185, respectively;
[0652] (b) SEQ ID NOs: 1104 and 1194, respectively;
[0653] (c) SEQ ID NOs: 1093 and 1183, respectively; and
[0654] (d) SEQ ID NOs: 1100 and 1190, respectively.

[0655] In some embodiments, an oligonucleotide for reducing expression of STAT3 mRNA comprises a sense and antisense strand comprising nucleotide sequences selected from:
[0656] (a) SEQ ID NOs: 1042 and 1132, respectively;
[0657] (b) SEQ ID NOs: 1055 and 1145, respectively;
[0658] (c) SEQ ID NOs: 1056 and 1146, respectively; and
[0659] (d) SEQ ID NOs: 1100 and 1190, respectively.

[0660] In some embodiments, the sense strand comprises the sequence of SEQ ID NO: 1042 and the antisense strand comprises the sequence of SEQ ID NO: 1132.

[0661] In some embodiments, the sense strand comprises the sequence of SEQ ID NO: 1055 and the antisense strand comprises the sequence of SEQ ID NO: 1145.

[0662] In some embodiments, the sense strand comprises the sequence of SEQ ID NO: 1056 and the antisense strand comprises the sequence of SEQ ID NO: 1146.

[0663] In some embodiments, the sense strand comprises the sequence of SEQ ID NO: 1100 and the antisense strand comprises the sequence of SEQ ID NO: 1190.

[0664] In some embodiments, an oligonucleotide for reducing expression of STAT3 mRNA comprises a sense and antisense strand comprising nucleotide sequences selected from:
[0665] (a) SEQ ID NOs: 1042 and 1225, respectively;
[0666] (b) SEQ ID NOs: 1055 and 1226, respectively;
[0667] (c) SEQ ID NOs: 1056 and 1227, respectively; and
[0668] (d) SEQ ID NOs: 1100 and 1228, respectively.

[0669] In some embodiments, an oligonucleotide for reducing expression of STAT3 mRNA described herein comprises minimal off-target effects. For example, in some embodiments, an oligonucleotide described herein reduces STAT3 expression and does not reduce STAT1 expression or reduces STAT1 expression less than STAT3 expression. In some embodiments, the oligonucleotide comprises a sense strand comprising the nucleotide sequence set forth in SEQ ID NO: 862 and an antisense strand comprising the nucleotide sequence set forth in SEQ ID NO: 952, wherein the oligonucleotide reduces STAT3 expression and does not reduce STAT1 expression or reduces STAT1 expression less than STAT3 expression. In some embodiments, the oligonucleotide comprises a sense strand comprising the nucleotide sequence set forth in SEQ ID NO: 1042 and an antisense strand comprising the nucleotide sequence set forth in SEQ ID NO: 1132, wherein the oligonucleotide reduces STAT3 expression and does not reduce STAT1 expression or reduces STAT1 expression less than STAT3 expression. In some embodiments, the oligonucleotide comprises a sense strand comprising the nucleotide sequence set forth in SEQ ID NO: 875 and an antisense strand comprising the nucleotide sequence set forth in SEQ ID NO: 965, wherein the oligonucleotide reduces STAT3 expression and does not reduce STAT1 expression or reduces STAT1 expression less than STAT3 expression. In some embodiments, the oligonucleotide comprises a sense strand comprising the nucleotide sequence set forth in SEQ ID NO: 1055 and an antisense strand comprising the nucleotide sequence set forth in SEQ ID NO: 1145, wherein the oligonucleotide reduces STAT3 expression and does not reduce STAT1 expression or reduces STAT1 expression less than STAT3 expression.

[0670] In some embodiments, an oligonucleotide for reducing expression of STAT3 mRNA described herein is a species cross-reactive oligonucleotide. In some embodiments, an oligonucleotide described herein is capable of reducing expression of STAT3 mRNA of at least two different species. In some embodiments, an oligonucleotide described herein is capable of reducing expression of STAT3 mRNA of at least two different species but does not cross-react with non-STAT3 mRNA (e.g., STAT1). In some embodiments, an oligonucleotide for reducing expression of STAT3 mRNA is cross-reactive between at least two species. In some embodiments, an oligonucleotide for reducing expression of STAT3 cross-reacts with human, non-human primate, and mouse STAT3 mRNA. In some embodiments, an oligonucleotide for reducing expression of STAT3 mRNA cross-reacts with human and mouse STAT3 mRNA. In some embodiments, an oligonucleotide for reducing expression of STAT3 mRNA cross-reacts with human and non-human primate STAT3 mRNA.

[0671] In some embodiments, an oligonucleotide for reducing expression of STAT3 mRNA reduces STAT3 mRNA by at least 50%, at least 55%, at least 60%, at least 65%, at least 70%, at least 75%, at least 80%, at least 85%, at least 90%, or at least 95%.

[0672] In some embodiments, an oligonucleotide for reducing expression of STAT3 mRNA reduces STAT3 mRNA by at least 50% to at least 75% in human, non-human primate, and mouse (i.e. the oligonucleotide is a species cross-reactive oligonucleotide). In some embodiments, an oligonucleotide for reducing expression of STAT3 mRNA reduces STAT3 mRNA by at least 50%, at least 55%, at least 60%, at least 65%, at least 70%, or at least 75% in human, non-human primate, and mouse (i.e. the oligonucleotide is a species cross-reactive oligonucleotide). In some embodiments, an oligonucleotide for reducing expression of STAT3 mRNA reduces STAT3 mRNA by at least 80%, at least 85%, at least 90%, or at least 95% in human, non-human primate, and mouse (i.e. the oligonucleotide is a species cross-reactive oligonucleotide).

[0673] In some embodiments, an oligonucleotide for reducing expression of STAT3 mRNA reduces STAT3 mRNA by at least 50% to at least 75% in human and non-human primate (i.e. the oligonucleotide is a species cross-reactive oligonucleotide). In some embodiments, an oligonucleotide for reducing expression of STAT3 mRNA reduces STAT3 mRNA by at least 50%, at least 55%, at least 60%, at least 65%, at least 70%, or at least 75% in human and non-human primate (i.e. the oligonucleotide is a species cross-reactive oligonucleotide). In some embodiments, an oligonucleotide for reducing expression of STAT3 mRNA reduces STAT3 mRNA by at least 80%, at least 85%, at least 90%, or at least 95% in human and non-human primate (i.e. the oligonucleotide is a species cross-reactive oligonucleotide).

[0674] In some embodiments, an oligonucleotide for reducing expression of STAT3 mRNA reduces STAT3 mRNA by at least 50% to at least 75% in human and mouse (i.e. the oligonucleotide is a species cross-reactive oligonucleotide). In some embodiments, an oligonucleotide for reducing expression of STAT3 mRNA reduces STAT3 mRNA by at least 50%, at least 55%, at least 60%, at least 65%, at least 70%, or at least 75% in human and mouse (i.e. the oligonucleotide is a species cross-reactive oligonucleotide). In some embodiments, an oligonucleotide for reducing expression of STAT3 mRNA reduces STAT3 mRNA by at least 80%, at least 85%, at least 90%, or at least 95% in human and mouse (i.e. the oligonucleotide is a species cross-reactive oligonucleotide). In some embodiments, an oligonucleotide for reducing expression of STAT3 mRNA comprises a sense and antisense strand selected from:
[0675] (a) SEQ ID NOs: 901 and 991, respectively;
[0676] (b) SEQ ID NOs: 910 and 1000, respectively;
[0677] (c) SEQ ID NOs: 899 and 989, respectively;
[0678] (d) SEQ ID NOs: 896 and 986, respectively;
[0679] (e) SEQ ID NOs: 892 and 982, respectively;
[0680] (f) SEQ ID NOs: 890 and 980, respectively; and
[0681] (g) SEQ ID NOs: 889 and 979, respectively,
   wherein the oligonucleotide reduces STAT3 mRNA in humans, non-human primates, and mice (i.e. the oligonucleotide is a species cross-reactive oligonucleotide).

[0682] In some embodiments, an oligonucleotide for reducing expression of STAT3 mRNA comprises a sense and antisense strand selected from:
[0683] (a) SEQ ID NOs: 940 and 1030, respectively;
[0684] (b) SEQ ID NOs: 937 and 1027, respectively; and
[0685] (c) SEQ ID NOs: 939 and 1029, respectively,
   wherein the oligonucleotide reduces STAT3 mRNA in humans, non-human primates, and mice (i.e. the oligonucleotide is a species cross-reactive oligonucleotide).

[0686] In some embodiments, an oligonucleotide for reducing expression of STAT3 mRNA comprises a sense and antisense strand selected from:
[0687] (a) SEQ ID NOs: 915 and 1005, respectively;
[0688] (b) SEQ ID NOs: 924 and 1014, respectively;
[0689] (c) SEQ ID NOs: 913 and 1003, respectively; and
[0690] (d) SEQ ID NOs: 920 and 1010, respectively,
   wherein the oligonucleotide reduces STAT3 mRNA in humans, non-human primates, and mice (i.e. the oligonucleotide is a species cross-reactive oligonucleotide).

[0691] In some embodiments, an oligonucleotide for reducing expression of STAT3 mRNA comprises the sense strand sequence of SEQ ID NO: 862 and the antisense strand sequence of SEQ ID NO: 952, wherein the oligonucleotide reduces STAT3 mRNA in humans and non-human primates (i.e. the oligonucleotide is a species cross-reactive oligonucleotide).

[0692] In some embodiments, an oligonucleotide for reducing expression of STAT3 mRNA comprises the sense strand sequence of SEQ ID NO: 875 and the antisense strand sequence of SEQ ID NO: 965, wherein the oligonucleotide reduces STAT3 mRNA in humans.

[0693] In some embodiments, an oligonucleotide for reducing expression of STAT3 mRNA comprises the sense strand sequence of SEQ ID NO: 876 and the antisense strand sequence of SEQ ID NO: 966, wherein the oligonucleotide reduces STAT3 mRNA in humans.

[0694] In some embodiments, an oligonucleotide for reducing expression of STAT3 mRNA comprises the sense strand sequence of SEQ ID NO: 920 and the antisense strand sequence of SEQ ID NO: 1010, wherein the oligonucleotide reduces STAT3 mRNA in humans.

[0695] In some embodiments, an oligonucleotide for reducing expression of STAT3 mRNA comprises a sense and antisense strand selected from:
[0696] (a) SEQ ID NOs: 857 and 947, respectively;
[0697] (b) SEQ ID NOs: 858 and 948, respectively;
[0698] (c) SEQ ID NOs: 859 and 949, respectively;
[0699] (d) SEQ ID NOs: 860 and 950, respectively;
[0700] (e) SEQ ID NOs: 862 and 952, respectively;
[0701] (f) SEQ ID NOs: 867 and 957, respectively;
[0702] (g) SEQ ID NOs: 875 and 965, respectively; and
[0703] (h) SEQ ID NOs: 876 and 966, respectively,
   wherein the oligonucleotide reduces STAT3 mRNA by at least 75%.

[0704] In some embodiments, an oligonucleotide for reducing expression of STAT3 mRNA comprises a sense and antisense strand selected from:
[0705] (a) SEQ ID NOs: 901 and 991, respectively;
[0706] (b) SEQ ID NOs: 910 and 1000, respectively;
[0707] (c) SEQ ID NOs: 899 and 989, respectively;
[0708] (d) SEQ ID NOs: 896 and 986, respectively;
[0709] (e) SEQ ID NOs: 892 and 982, respectively;
[0710] (f) SEQ ID NOs: 890 and 980, respectively; and
[0711] (g) SEQ ID NOs: 889 and 979, respectively,
   wherein the oligonucleotide reduces STAT3 mRNA by at least 75%.

[0712] In some embodiments, an oligonucleotide for reducing expression of STAT3 mRNA comprises a sense and antisense strand selected from:
[0713] (a) SEQ ID NOs: 940 and 1030, respectively;
[0714] (b) SEQ ID NOs: 937 and 1027, respectively; and
[0715] (c) SEQ ID NOs: 939 and 1029, respectively,
   wherein the oligonucleotide reduces STAT3 mRNA by at least 75%.

[0716] In some embodiments, an oligonucleotide for reducing expression of STAT3 mRNA comprises a sense and antisense strand selected from:
[0717] (a) SEQ ID NOs: 915 and 1005, respectively;
[0718] (b) SEQ ID NOs: 924 and 1014, respectively;
[0719] (c) SEQ ID NOs: 913 and 1003, respectively; and
[0720] (d) SEQ ID NOs: 920 and 1010, respectively,
   wherein the oligonucleotide reduces STAT3 mRNA by at least 75%.

[0721] In some embodiments, an oligonucleotide for reducing expression of STAT3 mRNA comprises a sense and antisense strand selected from:
[0722] (a) SEQ ID NOs: 862 and 952, respectively;
[0723] (b) SEQ ID NOs: 875 and 965, respectively;
[0724] (c) SEQ ID NOs: 876 and 966, respectively; and
[0725] (d) SEQ ID NOs: 920 and 1010, respectively,
   wherein the oligonucleotide reduces STAT3 mRNA by at least 75%.

[0726] In some embodiments, an oligonucleotide for reducing expression of STAT3 mRNA comprises the sense strand sequence of SEQ ID NO: 862 and the antisense strand sequence of SEQ ID NO: 952, wherein the oligonucleotide reduces STAT3 mRNA by at least 75%.

[0727] In some embodiments, an oligonucleotide for reducing expression of STAT3 mRNA comprises the sense strand sequence of SEQ ID NO: 875 and the antisense strand sequence of SEQ ID NO: 965, wherein the oligonucleotide reduces STAT3 mRNA by at least 75%.

[0728] In some embodiments, an oligonucleotide for reducing expression of STAT3 mRNA comprises the sense strand sequence of SEQ ID NO: 876 and the antisense strand sequence of SEQ ID NO: 966, wherein the oligonucleotide reduces STAT3 mRNA by at least 75%.

[0729] In some embodiments, an oligonucleotide for reducing expression of STAT3 mRNA comprises the sense strand sequence of SEQ ID NO: 920 and the antisense strand sequence of SEQ ID NO: 1010, wherein the oligonucleotide reduces STAT3 mRNA by at least 75%.

[0730] In some embodiments, an oligonucleotide for reducing expression of STAT3 mRNA comprises a sense and antisense strand selected from:
[0731] (a) SEQ ID NOs: 857 and 947, respectively;
[0732] (b) SEQ ID NOs: 858 and 948, respectively;
[0733] (c) SEQ ID NOs: 859 and 949, respectively;
[0734] (d) SEQ ID NOs: 860 and 950, respectively;
[0735] (e) SEQ ID NOs: 862 and 952, respectively;
[0736] (f) SEQ ID NOs: 867 and 957, respectively;
[0737] (g) SEQ ID NOs: 875 and 965, respectively; and
[0738] (h) SEQ ID NOs: 876 and 966, respectively,
   wherein the oligonucleotide is conjugated to a lipid.

[0739] In some embodiments, an oligonucleotide for reducing expression of STAT3 mRNA comprises a sense and antisense strand selected from:
[0740] (a) SEQ ID NOs: 901 and 991, respectively;
[0741] (b) SEQ ID NOs: 910 and 1000, respectively;
[0742] (c) SEQ ID NOs: 899 and 989, respectively;
[0743] (d) SEQ ID NOs: 896 and 986, respectively;
[0744] (e) SEQ ID NOs: 892 and 982, respectively;
[0745] (f) SEQ ID NOs: 890 and 980, respectively; and
[0746] (g) SEQ ID NOs: 889 and 979, respectively,
   wherein the oligonucleotide is conjugated to a lipid on the sense strand.

[0747] In some embodiments, an oligonucleotide for reducing expression of STAT3 mRNA comprises a sense and antisense strand selected from:
[0748] (a) SEQ ID NOs: 940 and 1030, respectively;
[0749] (b) SEQ ID NOs: 937 and 1027, respectively; and
[0750] (c) SEQ ID NOs: 939 and 1029, respectively,
   wherein the oligonucleotide is conjugated to a lipid on the sense strand.

[0751] In some embodiments, an oligonucleotide for reducing expression of STAT3 mRNA comprises a sense and antisense strand selected from:
[0752] (a) SEQ ID NOs: 915 and 1005, respectively;
[0753] (b) SEQ ID NOs: 924 and 1014, respectively;
[0754] (c) SEQ ID NOs: 913 and 1003, respectively; and
[0755] (d) SEQ ID NOs: 920 and 1010, respectively,
   wherein the oligonucleotide is conjugated to a lipid on the sense strand.

[0756] In some embodiments, an oligonucleotide for reducing expression of STAT3 mRNA comprises a sense and antisense strand selected from:
[0757] (a) SEQ ID NOs: 862 and 952, respectively;
[0758] (b) SEQ ID NOs: 875 and 965, respectively;
[0759] (c) SEQ ID NOs: 876 and 966, respectively; and
[0760] (d) SEQ ID NOs: 920 and 1010, respectively,
   wherein the oligonucleotide is conjugated to a lipid on the sense strand.

[0761] In some embodiments, an oligonucleotide for reducing expression of STAT3 mRNA comprises the sense strand sequence of SEQ ID NO: 862 and the antisense strand sequence of SEQ ID NO: 952, wherein the oligonucleotide is conjugated to a lipid on the sense strand.

[0762] In some embodiments, an oligonucleotide for reducing expression of STAT3 mRNA comprises the sense strand sequence of SEQ ID NO: 875 and the antisense strand sequence of SEQ ID NO: 965, wherein the oligonucleotide is conjugated to a lipid on the sense strand.

[0763] In some embodiments, an oligonucleotide for reducing expression of STAT3 mRNA comprises the sense strand sequence of SEQ ID NO: 876 and the antisense strand sequence of SEQ ID NO: 966, wherein the oligonucleotide is conjugated to a lipid on the sense strand.

[0764] In some embodiments, an oligonucleotide for reducing expression of STAT3 mRNA comprises the sense strand sequence of SEQ ID NO: 920 and the antisense strand sequence of SEQ ID NO: 1010, wherein the oligonucleotide is conjugated to a lipid on the sense strand.

[0765] In some embodiments, an oligonucleotide for reducing expression of STAT3 mRNA comprises a sense and antisense strand selected from:
[0766] (a) SEQ ID NOs: 857 and 947, respectively;
[0767] (b) SEQ ID NOs: 858 and 948, respectively;
[0768] (c) SEQ ID NOs: 859 and 949, respectively;
[0769] (d) SEQ ID NOs: 860 and 950, respectively;
[0770] (e) SEQ ID NOs: 862 and 952, respectively;
[0771] (f) SEQ ID NOs: 867 and 957, respectively;
[0772] (g) SEQ ID NOs: 875 and 965, respectively; and
[0773] (h) SEQ ID NOs: 876 and 966, respectively,
   wherein the oligonucleotide is conjugated to a C18 lipid on the sense strand.

[0774] In some embodiments, an oligonucleotide for reducing expression of STAT3 mRNA comprises a sense and antisense strand selected from:
[0775] (a) SEQ ID NOs: 901 and 991, respectively;
[0776] (b) SEQ ID NOs: 910 and 1000, respectively;
[0777] (c) SEQ ID NOs: 899 and 989, respectively;
[0778] (d) SEQ ID NOs: 896 and 986, respectively;
[0779] (e) SEQ ID NOs: 892 and 982, respectively;
[0780] (f) SEQ ID NOs: 890 and 980, respectively; and
[0781] (g) SEQ ID NOs: 889 and 979, respectively,
   wherein the oligonucleotide is conjugated to a C18 lipid on the sense strand.

[0782] In some embodiments, an oligonucleotide for reducing expression of STAT3 mRNA comprises a sense and antisense strand selected from:
[0783] (a) SEQ ID NOs: 940 and 1030, respectively;
[0784] (b) SEQ ID NOs: 937 and 1027, respectively; and
[0785] (c) SEQ ID NOs: 939 and 1029, respectively,
   wherein the oligonucleotide is conjugated to a C18 lipid on the sense strand.

[0786] In some embodiments, an oligonucleotide for reducing expression of STAT3 mRNA comprises a sense and antisense strand selected from:
[0787] (a) SEQ ID NOs: 915 and 1005, respectively;
[0788] (b) SEQ ID NOs: 924 and 1014, respectively;
[0789] (c) SEQ ID NOs: 913 and 1003, respectively; and
[0790] (d) SEQ ID NOs: 920 and 1010, respectively,
   wherein the oligonucleotide is conjugated to a C18 lipid on the sense strand.

[0791] In some embodiments, an oligonucleotide for reducing expression of STAT3 mRNA comprises a sense and antisense strand selected from:
[0792] (a) SEQ ID NOs: 862 and 952, respectively;
[0793] (b) SEQ ID NOs: 875 and 965, respectively;
[0794] (c) SEQ ID NOs: 876 and 966, respectively; and
[0795] (d) SEQ ID NOs: 920 and 1010, respectively,
   wherein the oligonucleotide is conjugated to a C18 lipid on the sense strand.

[0796] In some embodiments, an oligonucleotide for reducing expression of STAT3 mRNA comprises the sense strand sequence of SEQ ID NO: 862 and the antisense strand sequence of SEQ ID NO: 952, wherein the oligonucleotide is conjugated to a C18 lipid on the sense strand.

[0797] In some embodiments, an oligonucleotide for reducing expression of STAT3 mRNA comprises the sense strand sequence of SEQ ID NO: 875 and the antisense strand sequence of SEQ ID NO: 965, wherein the oligonucleotide is conjugated to a C18 lipid on the sense strand.

[0798] In some embodiments, an oligonucleotide for reducing expression of STAT3 mRNA comprises the sense strand sequence of SEQ ID NO: 876 and the antisense strand sequence of SEQ ID NO: 966, wherein the oligonucleotide is conjugated to a C18 lipid on the sense strand.

[0799] In some embodiments, an oligonucleotide for reducing expression of STAT3 mRNA comprises the sense strand sequence of SEQ ID NO: 920 and the antisense strand sequence of SEQ ID NO: 1010, wherein the oligonucleotide is conjugated to a C18 lipid on the sense strand.

[0800] In some embodiments, an oligonucleotide for reducing expression of STAT3 mRNA comprises a sense and antisense strand selected from:
[0801] (a) SEQ ID NOs: 901 and 991, respectively;
[0802] (b) SEQ ID NOs: 910 and 1000, respectively;
[0803] (c) SEQ ID NOs: 899 and 989, respectively;
[0804] (d) SEQ ID NOs: 896 and 986, respectively;
[0805] (e) SEQ ID NOs: 892 and 982, respectively;
[0806] (f) SEQ ID NOs: 890 and 980, respectively; and
[0807] (g) SEQ ID NOs: 889 and 979, respectively,
   wherein the oligonucleotide reduces STAT3 mRNA in humans, non-human primates, and mice (i.e. the oligonucleotide is a species cross-reactive oligonucleotide) by at least 75%.

[0808] In some embodiments, an oligonucleotide for reducing expression of STAT3 mRNA comprises a sense and antisense strand selected from:
[0809] (a) SEQ ID NOs: 940 and 1030, respectively;
[0810] (b) SEQ ID NOs: 937 and 1027, respectively; and
[0811] (c) SEQ ID NOs: 939 and 1029, respectively,
   wherein the oligonucleotide reduces STAT3 mRNA in humans and mice (i.e. the oligonucleotide is a species cross-reactive oligonucleotide) by at least 75%.

[0812] In some embodiments, an oligonucleotide for reducing expression of STAT3 mRNA comprises a sense and antisense strand selected from:
[0813] (a) SEQ ID NOs: 915 and 1005, respectively;
[0814] (b) SEQ ID NOs: 924 and 1014, respectively;
[0815] (c) SEQ ID NOs: 913 and 1003, respectively; and
[0816] (d) SEQ ID NOs: 920 and 1010, respectively,
   wherein the oligonucleotide reduces STAT3 mRNA in humans by at least 75%.

[0817] In some embodiments, an oligonucleotide for reducing expression of STAT3 mRNA comprises the sense strand sequence of SEQ ID NO: 862 and the antisense strand sequence of SEQ ID NO: 952, wherein the oligonucleotide reduces STAT3 mRNA in humans and non-human primates (i.e. the oligonucleotide is a species cross-reactive oligonucleotide) by at least 75%.

[0818] In some embodiments, an oligonucleotide for reducing expression of STAT3 mRNA comprises the sense strand sequence of SEQ ID NO: 875 and the antisense strand sequence of SEQ ID NO: 965, wherein the oligonucleotide reduces STAT3 mRNA in humans by at least 75%.

[0819] In some embodiments, an oligonucleotide for reducing expression of STAT3 mRNA comprises the sense strand sequence of SEQ ID NO: 876 and the antisense strand sequence of SEQ ID NO: 966, wherein the oligonucleotide reduces STAT3 mRNA in humans by at least 75%.

[0820] In some embodiments, an oligonucleotide for reducing expression of STAT3 mRNA comprises the sense strand sequence of SEQ ID NO: 920 and the antisense strand sequence of SEQ ID NO: 1010, wherein the oligonucleotide reduces STAT3 mRNA in humans by at least 75%.

[0821] In some embodiments, an oligonucleotide for reducing expression of STAT3 mRNA comprises a sense and antisense strand selected from:
[0822] (a) SEQ ID NOs: 901 and 991, respectively;
[0823] (b) SEQ ID NOs: 910 and 1000, respectively;
[0824] (c) SEQ ID NOs: 899 and 989, respectively;
[0825] (d) SEQ ID NOs: 896 and 986, respectively;
[0826] (e) SEQ ID NOs: 892 and 982, respectively;
[0827] (f) SEQ ID NOs: 890 and 980, respectively; and
[0828] (g) SEQ ID NOs: 889 and 979, respectively,
   wherein the oligonucleotide is conjugated to a lipid on the sense strand and reduces STAT3 mRNA in humans, non-human primates, and mice (i.e. the oligonucleotide is a species cross-reactive oligonucleotide).

[0829] In some embodiments, an oligonucleotide for reducing expression of STAT3 mRNA comprises a sense and antisense strand selected from:
[0830] (a) SEQ ID NOs: 940 and 1030, respectively;
[0831] (b) SEQ ID NOs: 937 and 1027, respectively; and
[0832] (c) SEQ ID NOs: 939 and 1029, respectively,
   wherein the oligonucleotide is conjugated to a lipid on the sense strand and reduces STAT3 mRNA in humans and mice (i.e. the oligonucleotide is a species cross-reactive oligonucleotide).

[0833] In some embodiments, an oligonucleotide for reducing expression of STAT3 mRNA comprises a sense and antisense strand selected from:
[0834] (a) SEQ ID NOs: 915 and 1005, respectively;
[0835] (b) SEQ ID NOs: 924 and 1014, respectively;
[0836] (c) SEQ ID NOs: 913 and 1003, respectively; and
[0837] (d) SEQ ID NOs: 920 and 1010, respectively,
   wherein the oligonucleotide is conjugated to a lipid on the sense strand and reduces STAT3 mRNA in humans.

[0838] In some embodiments, an oligonucleotide for reducing expression of STAT3 mRNA comprises the sense strand sequence of SEQ ID NO: 862 and the antisense strand sequence of SEQ ID NO: 952, wherein the oligonucleotide is conjugated to a lipid on the sense strand and reduces STAT3 mRNA in humans and non-human primates (i.e. the oligonucleotide is a species cross-reactive oligonucleotide).

[0839] In some embodiments, an oligonucleotide for reducing expression of STAT3 mRNA comprises the sense strand sequence of SEQ ID NO: 875 and the antisense strand sequence of SEQ ID NO: 965, wherein the oligonucleotide is conjugated to a lipid on the sense strand and reduces STAT3 mRNA in humans.

[0840] In some embodiments, an oligonucleotide for reducing expression of STAT3 mRNA comprises the sense strand sequence of SEQ ID NO: 876 and the antisense strand sequence of SEQ ID NO: 966, wherein the oligonucleotide is conjugated to a lipid on the sense strand and reduces STAT3 mRNA in humans.

[0841] In some embodiments, an oligonucleotide for reducing expression of STAT3 mRNA comprises the sense strand sequence of SEQ ID NO: 920 and the antisense strand sequence of SEQ ID NO: 1010, wherein the oligonucleotide is conjugated to a lipid on the sense strand and reduces STAT3 mRNA in humans.

[0842] In some embodiments, an oligonucleotide for reducing expression of STAT3 mRNA comprises a sense and antisense strand selected from:
[0843] (a) SEQ ID NOs: 901 and 991, respectively;
[0844] (b) SEQ ID NOs: 910 and 1000, respectively;
[0845] (c) SEQ ID NOs: 899 and 989, respectively;
[0846] (d) SEQ ID NOs: 896 and 986, respectively;
[0847] (e) SEQ ID NOs: 892 and 982, respectively;
[0848] (f) SEQ ID NOs: 890 and 980, respectively; and
[0849] (g) SEQ ID NOs: 889 and 979, respectively,
   wherein the oligonucleotide is conjugated to a C18 lipid on the sense strand and reduces STAT3 mRNA in humans, non-human primates, and mice (i.e. the oligonucleotide is a species cross-reactive oligonucleotide).

[0850] In some embodiments, an oligonucleotide for reducing expression of STAT3 mRNA comprises a sense and antisense strand selected from:
[0851] (a) SEQ ID NOs: 940 and 1030, respectively;
[0852] (b) SEQ ID NOs: 937 and 1027, respectively; and
[0853] (c) SEQ ID NOs: 939 and 1029, respectively,
   wherein the oligonucleotide is conjugated to a C18 lipid on the sense strand and reduces STAT3 mRNA in humans and mice (i.e. the oligonucleotide is a species cross-reactive oligonucleotide).

[0854] In some embodiments, an oligonucleotide for reducing expression of STAT3 mRNA comprises a sense and antisense strand selected from:
[0855] (a) SEQ ID NOs: 915 and 1005, respectively;
[0856] (b) SEQ ID NOs: 924 and 1014, respectively;
[0857] (c) SEQ ID NOs: 913 and 1003, respectively; and
[0858] (d) SEQ ID NOs: 920 and 1010, respectively,
   wherein the oligonucleotide is conjugated to a C18 lipid on the sense strand and reduces STAT3 mRNA in humans.

[0859] In some embodiments, an oligonucleotide for reducing expression of STAT3 mRNA comprises the sense strand sequence of SEQ ID NO: 862 and the antisense strand sequence of SEQ ID NO: 952, wherein the oligonucleotide is conjugated to a C18 lipid on the sense strand and reduces STAT3 mRNA in humans and non-human primates (i.e. the oligonucleotide is a species cross-reactive oligonucleotide).

[0860] In some embodiments, an oligonucleotide for reducing expression of STAT3 mRNA comprises the sense strand sequence of SEQ ID NO: 875 and the antisense strand sequence of SEQ ID NO: 965, wherein the oligonucleotide is conjugated to a C18 on the sense strand lipid and reduces STAT3 mRNA in humans.

[0861] In some embodiments, an oligonucleotide for reducing expression of STAT3 mRNA comprises the sense strand sequence of SEQ ID NO: 876 and the antisense strand sequence of SEQ ID NO: 966, wherein the oligonucleotide is conjugated to a C18 lipid on the sense strand and reduces STAT3 mRNA in humans.

[0862] In some embodiments, an oligonucleotide for reducing expression of STAT3 mRNA comprises the sense strand sequence of SEQ ID NO: 920 and the antisense strand sequence of SEQ ID NO: 1010, wherein the oligonucleotide is conjugated to a C18 lipid on the sense strand and reduces STAT3 mRNA in humans.

[0863] In some embodiments, an oligonucleotide for reducing expression of STAT3 mRNA comprises a sense and antisense strand selected from:
[0864] (a) SEQ ID NOs: 901 and 991, respectively;
[0865] (b) SEQ ID NOs: 910 and 1000, respectively;
[0866] (c) SEQ ID NOs: 899 and 989, respectively;
[0867] (d) SEQ ID NOs: 896 and 986, respectively;
[0868] (e) SEQ ID NOs: 892 and 982, respectively;
[0869] (f) SEQ ID NOs: 890 and 980, respectively; and
[0870] (g) SEQ ID NOs: 889 and 979, respectively,
   wherein the oligonucleotide is conjugated to a lipid on the sense strand and reduces STAT3 mRNA in humans, non-human primates, and mice (i.e. the oligonucleotide is a species cross-reactive oligonucleotide) by at least 75%.

[0871] In some embodiments, an oligonucleotide for reducing expression of STAT3 mRNA comprises a sense and antisense strand selected from:
[0872] (a) SEQ ID NOs: 940 and 1030, respectively;
[0873] (b) SEQ ID NOs: 937 and 1027, respectively; and
[0874] (c) SEQ ID NOs: 939 and 1029, respectively,
   wherein the oligonucleotide is conjugated to a lipid on the sense strand and reduces STAT3 mRNA in humans and mice (i.e. the oligonucleotide is a species cross-reactive oligonucleotide) by at least 75%.

[0875] In some embodiments, an oligonucleotide for reducing expression of STAT3 mRNA comprises a sense and antisense strand selected from:
[0876] (a) SEQ ID NOs: 915 and 1005, respectively;
[0877] (b) SEQ ID NOs: 924 and 1014, respectively;
[0878] (c) SEQ ID NOs: 913 and 1003, respectively; and
[0879] (d) SEQ ID NOs: 920 and 1010, respectively,
   wherein the oligonucleotide is conjugated to a lipid on the sense strand and reduces STAT3 mRNA in humans by at least 75%.

[0880] In some embodiments, an oligonucleotide for reducing expression of STAT3 mRNA comprises the sense strand sequence of SEQ ID NO: 862 and the antisense strand sequence of SEQ ID NO: 952, wherein the oligonucleotide is conjugated to a lipid on the sense strand and reduces STAT3 mRNA in humans and non-human primates (i.e. the oligonucleotide is a species cross-reactive oligonucleotide) by at least 75%.

[0881] In some embodiments, an oligonucleotide for reducing expression of STAT3 mRNA comprises the sense strand sequence of SEQ ID NO: 875 and the antisense strand sequence of SEQ ID NO: 965, wherein the oligonucleotide is conjugated to a lipid on the sense strand and reduces STAT3 mRNA in humans by at least 75%.

[0882] In some embodiments, an oligonucleotide for reducing expression of STAT3 mRNA comprises the sense strand sequence of SEQ ID NO: 876 and the antisense strand sequence of SEQ ID NO: 966, wherein the oligonucleotide is conjugated to a lipid on the sense strand and reduces STAT3 mRNA in humans by at least 75%.

[0883] In some embodiments, an oligonucleotide for reducing expression of STAT3 mRNA comprises the sense strand sequence of SEQ ID NO: 920 and the antisense strand sequence of SEQ ID NO: 1010, wherein the oligonucleotide is conjugated to a lipid on the sense strand and reduces STAT3 mRNA in humans by at least 75%.

[0884] In some embodiments, an oligonucleotide for reducing expression of STAT3 mRNA comprises a sense and antisense strand selected from:
[0885] (a) SEQ ID NOs: 901 and 991, respectively;
[0886] (b) SEQ ID NOs: 910 and 1000, respectively;
[0887] (c) SEQ ID NOs: 899 and 989, respectively;
[0888] (d) SEQ ID NOs: 896 and 986, respectively;
[0889] (e) SEQ ID NOs: 892 and 982, respectively;
[0890] (f) SEQ ID NOs: 890 and 980, respectively; and
[0891] (g) SEQ ID NOs: 889 and 979, respectively,
   wherein the oligonucleotide is conjugated to a C18 lipid on the sense strand and reduces STAT3 mRNA in humans, non-human primates, and mice (i.e. the oligonucleotide is a species cross-reactive oligonucleotide) by at least 75%.

[0892] In some embodiments, an oligonucleotide for reducing expression of STAT3 mRNA comprises a sense and antisense strand selected from:
[0893] (a) SEQ ID NOs: 940 and 1030, respectively;
[0894] (b) SEQ ID NOs: 937 and 1027, respectively; and
[0895] (c) SEQ ID NOs: 939 and 1029, respectively,
   wherein the oligonucleotide is conjugated to a C18 lipid on the sense strand and reduces STAT3 mRNA in humans and mice (i.e. the oligonucleotide is a species cross-reactive oligonucleotide) by at least 75%.

[0896] In some embodiments, an oligonucleotide for reducing expression of STAT3 mRNA comprises a sense and antisense strand selected from:
[0897] (a) SEQ ID NOs: 915 and 1005, respectively;
[0898] (b) SEQ ID NOs: 924 and 1014, respectively;
[0899] (c) SEQ ID NOs: 913 and 1003, respectively; and
[0900] (d) SEQ ID NOs: 920 and 1010, respectively,
   wherein the oligonucleotide is conjugated to a C18 lipid on the sense strand and reduces STAT3 mRNA in humans by at least 75%.

[0901] In some embodiments, an oligonucleotide for reducing expression of STAT3 mRNA comprises the sense strand sequence of SEQ ID NO: 862 and the antisense strand sequence of SEQ ID NO: 952, wherein the oligonucleotide is conjugated to a C18 lipid on the sense strand and reduces STAT3 mRNA in humans and non-human primates (i.e. the oligonucleotide is a species cross-reactive oligonucleotide) by at least 75%.

[0902] In some embodiments, an oligonucleotide for reducing expression of STAT3 mRNA comprises the sense strand sequence of SEQ ID NO: 875 and the antisense strand sequence of SEQ ID NO: 965, wherein the oligonucleotide is conjugated to a C18 lipid on the sense strand and reduces STAT3 mRNA in humans by at least 75%.

[0903] In some embodiments, an oligonucleotide for reducing expression of STAT3 mRNA comprises the sense strand sequence of SEQ ID NO: 876 and the antisense strand sequence of SEQ ID NO: 966, wherein the oligonucleotide is conjugated to a C18 lipid on the sense strand and reduces STAT3 mRNA in humans by at least 75%.

[0904] In some embodiments, an oligonucleotide for reducing expression of STAT3 mRNA comprises the sense strand sequence of SEQ ID NO: 920 and the antisense strand sequence of SEQ ID NO: 1010, wherein the oligonucleotide is conjugated to a C18 lipid on the sense strand and reduces STAT3 mRNA in humans by at least 75%.

### Formulations

[0905] Various formulations have been developed to facilitate oligonucleotide use. For example, oligonucleotides can be delivered to a subject or a cellular environment using a formulation that minimizes degradation, facilitates delivery and/or uptake, or provides another beneficial property to the oligonucleotides in the formulation. In some embodiments, an oligonucleotide is formulated in buffer solutions such as phosphate buffered saline solutions, liposomes, micellar structures, and capsids.

[0906] Formulations of oligonucleotides with cationic lipids can be used to facilitate transfection of the oligonucleotides into cells. For example, cationic lipids, such as lipofectin, cationic glycerol derivatives, and polycationic molecules (e.g., polylysine, can be used. Suitable lipids include Oligofectamine, Lipofectamine (Life Technologies), NC388 (Ribozyme Pharmaceuticals, Inc., Boulder, Colo.), or FuGene 6 (Roche) all of which can be used according to the manufacturer's instructions.

[0907] Accordingly, in some embodiments, a formulation comprises a lipid nanoparticle. In some embodiments, an excipient comprises a liposome, a lipid, a lipid complex, a microsphere, a microparticle, a nanosphere or a nanoparticle, or may be otherwise formulated for administration to the cells, tissues, organs, or body of a subject in need thereof (see, e.g., Remington: THE SCIENCE AND PRACTICE OF PHARMACY, 22nd edition, Pharmaceutical Press, 2013).

[0908] In some embodiments, the formulations herein comprise an excipient. In some embodiments, an excipient confers to a composition improved stability, improved absorption, improved solubility and/or therapeutic enhancement of the active ingredient. In some embodiments, an excipient is a buffering agent (e.g., sodium citrate, sodium phosphate, a tris base, or sodium hydroxide) or a vehicle (e.g., a buffered solution, petrolatum, dimethyl sulfoxide, or mineral oil). In some embodiments, an oligonucleotide is lyophilized for extending its shelf-life and then made into a solution before use (e.g., administration to a subject). Accordingly, an excipient in a composition comprising any one of the oligonucleotides described herein may be a lyoprotectant (e.g., mannitol, lactose, polyethylene glycol or polyvinylpyrrolidone) or a collapse temperature modifier (e.g., dextran, Ficoll™ or gelatin).

[0909] In some embodiments, a pharmaceutical composition is formulated to be compatible with its intended route of administration. Examples of routes of administration include parenteral (e.g., intravenous, intramuscular, intraperitoneal, intradermal, subcutaneous), oral (e.g., inhalation), transdermal (e.g., topical), transmucosal and rectal administration.

[0910] Pharmaceutical compositions suitable for injectable use include sterile aqueous solutions (where water soluble) or dispersions and sterile powders for the extemporaneous preparation of sterile injectable solutions or dispersion. For intravenous administration, suitable carriers include physiological saline, bacteriostatic water, Cremophor EL™ (BASF, Parsippany, N.J.) or phosphate buffered saline (PBS). The carrier can be a solvent or dispersion medium containing, for example, water, ethanol, polyol (e.g., glycerol, propylene glycol, and liquid polyethylene glycol, and the like), and suitable mixtures thereof. In many cases, it will be preferable to include isotonic agents, for example, sugars, polyalcohol's such as mannitol, sorbitol, sodium chloride in the composition. Sterile injectable solutions can be prepared by incorporating the oligonucleotides in a required amount in a selected solvent with one or a combination of ingredients enumerated above, as required, followed by filtered sterilization.

[0911] In some embodiments, a composition may contain at least about 0.1% of the therapeutic agent or more, although the percentage of the active ingredient(s) may be between about 1% to about 80% or more of the weight or volume of the total composition. Factors such as solubility, bioavailability, biological half-life, route of administration, product shelf life, as well as other pharmacological considerations will be contemplated by one skilled in the art of preparing such pharmaceutical formulations, and as such, a variety of dosages and treatment regimens may be desirable.

[0912] Even though several embodiments are directed to liver-targeted delivery of any of the oligonucleotides herein, targeting of other tissues is also contemplated.

### Methods of Use

### Reducing STAT3 Expression in Cells

[0913] The disclosure provides methods for contacting or delivering to a cell or population of cells an effective amount any one of oligonucleotides herein for purposes of reducing STAT3 expression. The methods can include the steps described herein, and these maybe be, but not necessarily, carried out in the sequence as described. Other sequences, however, also are conceivable. Moreover, individual, or multiple steps bay be carried out either in parallel and/or overlapping in time and/or individually or in multiply repeated steps. Furthermore, the methods may include additional, unspecified steps.

[0914] Methods herein are useful in any appropriate cell type. In some embodiments, a cell is any cell that expresses mRNA (e.g., hepatocytes, macrophages, monocyte-derived cells, prostate cancer cells, cells of the brain, endocrine tissue, bone marrow, lymph nodes, lung, gall bladder, liver, duodenum, small intestine, pancreas, kidney, gastrointestinal tract, bladder, adipose and soft tissue, and skin). In some embodiments, the cell is a primary cell obtained from a subject. In some embodiments, the primary cell has undergone a limited number of passages such that the cell substantially maintains is natural phenotypic properties. In some embodiments, a cell to which the oligonucleotide is delivered is ex vivo or in vitro (i.e., can be delivered to a cell in culture or to an organism in which the cell resides).

[0915] In some embodiments, the oligonucleotides herein are delivered using appropriate nucleic acid delivery methods including, but not limited to, injection of a solution containing the oligonucleotides, bombardment by particles covered by the oligonucleotides, exposing the cell or population of cells to a solution containing the oligonucleotides, or electroporation of cell membranes in the presence of the oligonucleotides. Other appropriate methods for delivering oligonucleotides to cells may be used, such as lipid-mediated carrier transport, chemical-mediated transport, and cationic liposome transfection such as calcium phosphate, and others.

[0916] In some embodiments, reduction of STAT3 expression can be determined by an appropriate assay or technique to evaluate one or more properties or characteristics of a cell or population of cells associated with STAT3 expression (e.g., using an STAT3 expression biomarker) or by an assay or technique that evaluates molecules that are directly indicative of STAT3 expression (e.g., STAT3 mRNA or STAT3 protein). In some embodiments, the extent to which an oligonucleotide herein reduces STAT3 expression is evaluated by comparing STAT3 expression in a cell or population of cells contacted with the oligonucleotide to an appropriate control (e.g., an appropriate cell or population of cells not contacted with the oligonucleotide or contacted with a control oligonucleotide). In some embodiments, an appropriate control level of mRNA expression into protein, after delivery of a RNAi molecule may be a predetermined level or value, such that a control level need not be measured every time. The predetermined level or value can take a variety of forms. In some embodiments, a predetermined level or value can be single cut-off value, such as a median or mean.

[0917] In some embodiments, administration of an oligonucleotide herein results in a reduction in STAT3 expression in a cell or population of cells. In some embodiments, the reduction in STAT3 or STAT3 expression is about 1% or lower, about 5% or lower, about 10% or lower, about 15% or lower, about 20% or lower, about 25% or lower, about 30% or lower, about 35% or lower, about 40% or lower, about 45% or lower, about 50% or lower, about 55% or lower, about 60% or lower, about 70% or lower, about 80% or lower, or about 90% or lower when compared with an appropriate control level of mRNA. The appropriate control level may be a level of mRNA expression and/or protein translation in a cell or population of cells that has not been contacted with an oligonucleotide herein. In some embodiments, the effect of delivery of an oligonucleotide to a cell according to a method herein is assessed after a finite period. For example, levels of mRNA may be analyzed in a cell at least about 8 hours, about 12 hours, about 18 hours, about 24 hours; or at least about 1, 2, 3, 4, 5, 6, 7 or even up to 14 days after introduction of the oligonucleotide into the cell.

[0918] In some embodiments, an oligonucleotide is delivered in the form of a transgene that is engineered to express in a cell the oligonucleotide or strands comprising the oligonucleotide (e.g., its sense and antisense strands). In some embodiments, an oligonucleotide is delivered using a transgene engineered to express any oligonucleotide disclosed herein. Transgenes may be delivered using viral vectors (e.g., adenovirus, retrovirus, vaccinia virus, poxvirus, adeno-associated virus, or herpes simplex virus) or non-viral vectors (e.g., plasmids or synthetic mRNAs). In some embodiments, transgenes can be injected directly to a subject.

### Medical Use

[0919] The disclosure also provides oligonucleotides for use, or adaptable for use, to treat a subject (e.g., a human having a disease, disorder or condition associated with STAT3 expression) that would benefit from reducing STAT3 expression. In some respects, the disclosure provides oligonucleotides for use, or adapted for use, to treat a subject having a disease, disorder or condition associated with expression of STAT3. The disclosure also provides oligonucleotides for use, or adaptable for use, in the manufacture of a medicament or pharmaceutical composition for treating a disease, disorder or condition associated with STAT3 expression. In some embodiments, the oligonucleotides for use, or adaptable for use, target STAT3 mRNA and reduce STAT3 expression (e.g., via the RNAi pathway). In some embodiments, the oligonucleotides for use, or adaptable for use, target STAT3 mRNA and reduce the amount or level of STAT3 mRNA or STAT3 mRNA, STAT3 protein and/or STAT3 activity.

[0920] In addition, the methods below can include selecting a subject having a disease, disorder or condition associated with STAT3 expression or is predisposed to the same. In some instances, the methods can include selecting an individual having a marker for a disease associated with STAT3 expression such as cancer or other chronic lymphoproliferative disorders.

[0921] Likewise, and as detailed below, the methods also may include steps such as measuring or obtaining a baseline value for a marker of STAT3 expression, and then comparing such obtained value to one or more other baseline values or values obtained after being administered the oligonucleotide to assess the effectiveness of treatment.

### Methods of Treatment

[0922] The disclosure also provides methods of treating a subject having, suspected of having, or at risk of developing a disease, disorder, or condition with an oligonucleotide herein. In some aspects, the disclosure provides methods of treating or attenuating the onset or progression of a disease, disorder or condition associated with STAT3 expression using the oligonucleotides herein. In other aspects, the disclosure provides methods to achieve one or more therapeutic benefits in a subject having a disease, disorder or condition associated with STAT3 expression using the oligonucleotides herein. In some embodiments of the methods herein, the subject is treated by administering a therapeutically effective amount of any one or more of the oligonucleotides herein. In some embodiments, treatment comprises reducing STAT3 expression. In some embodiments, the subject is treated therapeutically. In some embodiments, the subject is treated prophylactically.

[0923] In some embodiments of the methods herein, one or more oligonucleotides herein, or a pharmaceutical composition comprising one or more oligonucleotides, is administered to a subject having a disease, disorder or condition associated with STAT3 expression such that STAT3 expression is reduced in the subject, thereby treating the subject. In some embodiments, an amount or level of STAT3 mRNA is reduced in the subject. In some embodiments, an amount or level of STAT3 and/or protein is reduced in the subject

[0924] In some embodiments of the methods herein, an oligonucleotide herein, or a pharmaceutical composition comprising the oligonucleotide, is administered to a subject having a disease, disorder or condition associated with STAT3 such that STAT3 expression is reduced in the subject by at least about 30%, about 35%, about 40%, about 45%, about 50%, about 55%, about 60%, about 65%, about 70%, about 75%, about 80%, about 85%, about 90%, about 95%, about 99% or greater than 99% when compared to STAT3 expression prior to administration of one or more oligonucleotides or pharmaceutical composition. In some embodiments, STAT3 expression is reduced in the subject by at least about 30%, about 35%, about 40%, about 45%, about 50%, about 55%, about 60%, about 65%, about 70%, about 75%, about 80%, about 85%, about 90%, about 95%, about 99% or greater than 99% when compared to STAT3 expression in a subject (e.g., a reference or control subject) not receiving the oligonucleotide or oligonucleotides or pharmaceutical composition or receiving a control oligonucleotide or oligonucleotides, pharmaceutical composition or treatment.

[0925] In some embodiments of the methods herein, an oligonucleotide or oligonucleotides herein, or a pharmaceutical composition comprising the oligonucleotide or oligonucleotides, is administered to a subject having a disease, disorder or condition associated with STAT3 expression such that an amount or level of STAT3 mRNA is reduced in the subject by at least about 30%, about 35%, about 40%, about 45%, about 50%, about 55%, about 60%, about 65%, about 70%, about 75%, about 80%, about 85%, about 90%, about 95%, about 99% or greater than 99% when compared to the amount or level of STAT3 mRNA prior to administration of the oligonucleotide or pharmaceutical composition. In some embodiments, an amount or level of STAT3 mRNA is reduced in the subject by at least about 30%, about 35%, about 40%, about 45%, about 50%, about 55%, about 60%, about 65%, about 70%, about 75%, about 80%, about 85%, about 90%, about 95%, about 99% or greater than 99% when compared to an amount or level of STAT3 mRNA in a subject (e.g., a reference or control subject) not receiving the oligonucleotide or oligonucleotides or pharmaceutical composition or receiving a control oligonucleotide or oligonucleotides, pharmaceutical composition or treatment.

[0926] In some embodiments of the methods herein, an oligonucleotide or oligonucleotides herein, or a pharmaceutical composition comprising the oligonucleotide or oligonucleotides, is administered to a subject having a disease, disorder or condition associated with STAT3 expression such that an amount or level of STAT3 protein is reduced in the subject by at least about 30%, about 35%, about 40%, about 45%, about 50%, about 55%, about 60%, about 65%, about 70%, about 75%, about 80%, about 85%, about 90%, about 95%, about 99% or greater than 99% when compared to the amount or level of STAT3 protein prior to administration of the oligonucleotide or pharmaceutical composition. In some embodiments, an amount or level of STAT3 protein is reduced in the subject by at least about 30%, about 35%, about 40%, about 45%, about 50%, about 55%, about 60%, about 65%, about 70%, about 75%, about 80%, about 85%, about 90%, about 95%, about 99% or greater than 99% when compared to an amount or level of STAT3 protein in a subject (e.g., a reference or control subject) not receiving the oligonucleotide or oligonucleotides or pharmaceutical composition or receiving a control oligonucleotide, oligonucleotides or pharmaceutical composition or treatment.

[0927] In some embodiments of the methods herein, an oligonucleotide or oligonucleotides herein, or a pharmaceutical composition comprising the oligonucleotide or oligonucleotides, is administered to a subject having a disease, disorder or condition associated with STAT3 such that an amount or level of STAT3 activity/expression is reduced in the subject by at least about 30%, about 35%, about 40%, about 45%, about 50%, about 55%, about 60%, about 65%, about 70%, about 75%, about 80%, about 85%, about 90%, about 95%, about 99% or greater than 99% when compared to the amount or level of STAT3 activity prior to administration of the oligonucleotide or pharmaceutical composition. In some embodiments, an amount or level of STAT3 activity is reduced in the subject by at least about 30%, about 35%, about 40%, about 45%, about 50%, about 55%, about 60%, about 65%, about 70%, about 75%, about 80%, about 85%, about 90%, about 95%, about 99% or greater than 99% when compared to an amount or level of STAT3 activity in a subject (e.g., a reference or control subject) not receiving the oligonucleotide or pharmaceutical composition or receiving a control oligonucleotide, pharmaceutical composition or treatment.

[0928] Because of their high specificity, the oligonucleotides herein specifically target mRNAs of target genes of diseased cells and tissues. In preventing disease, the target gene may be one which is required for initiation or maintenance of the disease or which has been identified as being associated with a higher risk of contracting the disease. In treating disease, the oligonucleotide can be brought into contact with the cells or tissue exhibiting the disease. For example, an oligonucleotide substantially identical to all or part of a wild-type (i.e., native) or mutated gene associated with a disorder or condition associated with STAT3 expression may be brought into contact with or introduced into a cell or tissue type of interest such as a hepatocyte or other liver cell.

[0929] In some embodiments, the target gene may be a target gene from any mammal, such as a human target. Any gene may be silenced according to the method described herein.

[0930] Methods described herein are typically involve administering to a subject in an effective amount of an oligonucleotide or oligonucleotides, that is, an amount capable of producing a desirable therapeutic result. A therapeutically acceptable amount may be an amount that can therapeutically treat a disease or disorder. The appropriate dosage for any one subject will depend on certain factors, including the subject's size, body surface area, age, the particular composition to be administered, the active ingredient(s) in the composition, time and route of administration, general health, and other drugs being administered concurrently.

[0931] In some embodiments, a subject is administered any one of the compositions herein either enterally (e.g., orally, by gastric feeding tube, by duodenal feeding tube, via gastrostomy or rectally), parenterally (e.g., subcutaneous injection, intravenous injection or infusion, intra-arterial injection or infusion, intraosseous infusion, intramuscular injection, intracerebral injection, intracerebroventricular injection, intrathecal), topically (e.g., epicutaneous, inhalational, via eye drops, or through a mucous membrane), or by direct injection into a target organ (e.g., the liver of a subject). Typically, oligonucleotides herein are administered intravenously or subcutaneously.

[0932] As a non-limiting set of examples, the oligonucleotides herein would typically be administered quarterly (once every three months), bi-monthly (once every two months), monthly or weekly. For example, the oligonucleotides may be administered every week or at intervals of two, or three weeks. Alternatively, the oligonucleotides may be administered daily. In some embodiments, a subject is administered one or more loading doses of the oligonucleotide followed by one or more maintenance doses of the oligonucleotide.

[0933] In some embodiments the oligonucleotides herein are administered alone or in combination. In some embodiments the oligonucleotides herein are administered in combination concurrently, sequentially (in any order), or intermittently. For example, two oligonucleotides may be co-administered concurrently. Alternatively, one oligonucleotide may be administered and followed any amount of time later (e.g., one hour, one day, one week or one month) by the administration of a second oligonucleotide.

[0934] In some embodiments, the subject to be treated is a human or non-human primate or other mammalian subject. Other exemplary subjects include domesticated animals such as dogs and cats; livestock such as horses, cattle, pigs, sheep, goats, and chickens; and animals such as mice, rats, guinea pigs, and hamsters.

### Combination Treatment

[0935] In some embodiments, the oligonucleotides described herein are used in combination with at least one additional composition or therapeutic agent. In some aspects, the composition or therapeutic agent is selected from the group consisting of: a chemotherapy, a targeted anti-cancer therapy, an oncolytic drug, a cytotoxic agent, an immune-based therapy, a cytokine, surgical procedure, a radiation procedure, an activator of a costimulatory molecule, an inhibitor of an inhibitory molecule, a vaccine, or a cellular immunotherapy, or a combination thereof. In some embodiments, the composition or therapeutic agent targets TGFB, CXCR2, CCR2, ARG1, PTGS2, SOCS1 or PD-L1. In some embodiments, the composition or therapeutic agent targets TGFB. In some embodiments, the composition or therapeutic agent targets CXCR2. In some embodiments, the composition or therapeutic agent targets CCR2. In some embodiments, the composition or therapeutic agent targets ARG1. In some embodiments, the composition or therapeutic agent targets PTGS2. In some embodiments, the composition or therapeutic agent targets SOCS1. In some embodiments, the composition or therapeutic agent targets PD-L1. In some embodiments, the composition or therapeutic agent that targets any of the above targets, is an oligonucleotide (e.g., dsRNAi). In some embodiments, the composition or therapeutic agent that targets any of the above targets, is an antibody or antigen-binding fragment thereof.

### Kits

[0936] In some embodiments, the disclosure provides a kit comprising an oligonucleotide herein, and instructions for use. In some embodiments, the kit comprises an oligonucleotide herein, and a package insert containing instructions for use of the kit and/or any component thereof. In some embodiments, the kit comprises, in a suitable container, an oligonucleotide herein, one or more controls, and various buffers, reagents, enzymes and other standard ingredients well known in the art. In some embodiments, the container comprises at least one vial, well, test tube, flask, bottle, syringe, or other container means, into which the oligonucleotide is placed, and in some instances, suitably aliquoted. In some embodiments where an additional component is provided, the kit contains additional containers into which this component is placed. The kits can also include a means for containing the oligonucleotide and any other reagent in close confinement for commercial sale. Such containers may include injection or blow-molded plastic containers into which the desired vials are retained. Containers and/or kits can include labeling with instructions for use and/or warnings. In some embodiments, a kit comprises an oligonucleotide herein, and a pharmaceutically acceptable carrier, or a pharmaceutical composition comprising the oligonucleotide and instructions for treating or delaying progression of a disease, disorder or condition associated with STAT3 expression in a subject in need thereof. In some embodiments, a kit comprises an oligonucleotide herein, and a pharmaceutically acceptable carrier, or a pharmaceutical composition comprising the oligonucleotide and instructions for treating or delaying progression of a cancer in a subject in need thereof.

### EXAMPLES

[0937] While the disclosure has been described with reference to the specific embodiments set forth in the following Examples, it should be understood by those skilled in the art that various changes may be made, and equivalents may be substituted without departing from the true spirit and scope of the disclosure. Further, the following Examples are offered by way of illustration and are not intended to limit the scope of the disclosure in any manner. In addition, modifications may be made to adapt to a situation, material, composition of matter, process, process step or steps, to the objective, spirit, and scope of the disclosure. All such modifications are intended to be within the scope of the disclosure. Standard techniques well known in the art or the techniques specifically described below were utilized.

[0938] The following examples describe the development of lipid conjugate siRNA delivery mechanism to deliver an RNAi payload to myeloid-derived suppressor cells (MDSCs) to silence genes that mediate immune suppression. Initially a surrogate ALDH2-GalXC lipid conjugate was used to deliver payload to both subtypes of MDSCs in the tumor microenvironment (TME), as well as the MDSCs found in tumor draining lymph nodes (TdLN) to silence ALDH2. Later, a STAT3-GalXC lipid conjugate was constructed to target and silence the STAT3 gene in MDSCs. Targeting STAT3 is considered a promising approach since it is a main transcription factor associated with immunosuppressive activity in myeloid cells. STAT3 activation is known to play an important role in promoting tolerogenic effects in TME. Although STAT3 is expressed by tumor cells, the approach to target the STAT3 signaling in tumor associated myeloid cells in TME and TdLN, without affecting STAT3 signaling in cancer cells, was previously demonstrated to be sufficient to inhibit the tolerogenic effects and induce anti-tumor immunity and inhibit tumor growth of various solid tumors. (Kortylewski et al, NAT MED 2005). As a proof-of-concept target, we demonstrated STAT3 knockdown in both MDSCs in the TME and TdLN. These data suggest that a GalXC-STAT3-lipid conjugate or another target-conjugate combination tailored to an MDSC or TdLN specific target has a potential to sensitize treatment-refractory tumors to immune checkpoint blockade.

[0939] In order that the disclosure provided herein may be more fully understood, the following examples are set forth. The examples described in this application are offered to illustrate the methods, compositions, and systems provided herein and are not to be construed in any way as limiting their scope.

### Abbreviations

[0940] Ac: acetyl

[0941] AcOH: acetic acid
[0942] ACN: acetonitrile
[0943] Ad: adamantyl
[0944] AIBN: 2,2′-azo bisisobutyronitrile
[0945] Anhyd: anhydrous
[0946] Aq: aqueous
[0947] B₂Pin₂: bis (pinacolato)diboron-4,4,4′,4′,5,5,5′,5′-octamethyl-2,2′-bi(1,3,2-dioxaborolane)
[0948] BINAP: 2,2′-bis(diphenylphosphino)-1,1′-binaphthyl
[0949] BH₃: Borane
[0950] Bn: benzyl
[0951] Boc: tert-butoxycarbonyl
[0952] Boc₂O: di-tert-butyl dicarbonate
[0953] BPO: benzoyl peroxide
[0954] BuOH: n-butanol
[0955] CDI: carbonyldiimidazole
[0956] COD: cyclooctadiene
[0957] d: days
[0958] DABCO: 1,4-diazobicyclo[2.2.2]octane
[0959] DAST: diethylaminosulfur trifluoride
[0960] dba: dibenzylideneacetone
[0961] DBU: 1,8-diazobicyclo[5.4.0]undec-7-ene
[0962] DCE: 1,2-dichloroethane
[0963] DCM: dichloromethane
[0964] DEA: diethylamine
[0965] DHP: dihydropyran
[0966] DIBAL-H: diisobutylaluminum hydride
[0967] DIPA: diisopropylamine
[0968] DIPEA or DIEA: N,N-diisopropylethylamine
[0969] DMA: N,N-dimethylacetamide
[0970] DME: 1,2-dimethoxyethane
[0971] DMAP: 4-dimethylaminopyridine
[0972] DMF: N,N-dimethylformamide
[0973] DMP: Dess-Martin periodinane
[0974] DMSO-dimethyl sulfoxide
[0975] DMTr: 4,4′-dimethyoxytrityl
[0976] DPPA: diphenylphosphoryl azide
[0977] dppf: 1,1′-bis(diphenylphosphino)ferrocene
[0978] EDC or EDCI: 1-(3-dimethylaminopropyl)-3-ethylcarbodiimide hydrochloride
[0979] ee: enantiomeric excess
[0980] ESI: electrospray ionization
[0981] EA: ethyl acetate
[0982] EtOAc: ethyl acetate
[0983] EtOH: ethanol
[0984] FA: formic acid
[0985] h or hrs: hours
[0986] HATU: N,N,N′,N′-tetramethyl-O-(7-azabenzotriazol-1-yl)uronium
[0987] hexafluorophosphate
[0988] HCl: hydrochloric acid
[0989] HPLC: high performance liquid chromatography
[0990] HOAc: acetic acid
[0991] IBX: 2-iodoxybenzoic acid
[0992] IPA: isopropyl alcohol
[0993] KHMDS: potassium hexamethyldisilazide
[0994] K₂CO₃: potassium carbonate
[0995] LAH: lithium aluminum hydride
[0996] LDA: lithium diisopropylamide
[0997] L-DBTA: dibenzoyl-L-tartaric acid
[0998] m-CPBA: meta-chloroperbenzoic acid
[0999] M: molar
[1000] MeCN: acetonitrile
[1001] MeOH: methanol
[1002] Me₂S: dimethyl sulfide
[1003] MeONa: sodium methylate
[1004] Met iodomethane
[1005] min: minutes
[1006] mL: milliliters
[1007] mM: millimolar
[1008] mmol: millimoles
[1009] MPa: mega pascal
[1010] MOMCl: methyl chloromethyl ether
[1011] MsCl: methanesulfonyl chloride
[1012] MTBE: methyl tert-butyl ether
[1013] nBuLi: n-butyllithium
[1014] NaNO₂: sodium nitrite
[1015] NaOH: sodium hydroxide
[1016] Na₂SO₄: sodium sulfate
[1017] NBS: N-bromosuccinimide
[1018] NCS: N-chlorosuccinimide
[1019] NFSI: N-Fluorobenzenesulfonimide
[1020] NMO: N-methylmorpholine N-oxide
[1021] NMP: N-methylpyrrolidine
[1022] NMR: Nuclear Magnetic Resonance
[1023] ° C.: degrees Celsius
[1024] Pd/C: Palladium on Carbon
[1025] Pd(OAc)₂: Palladium Acetate
[1026] PBS: phosphate buffered saline
[1027] PE: petroleum ether
[1028] POCl₃: phosphorus oxychloride
[1029] PPh₃: triphenylphosphine
[1030] PyBOP: (Benzotriazol-1-yloxy)tripyrrolidinophosphonium hexafluorophosphate
[1031] Rel: relative
[1032] R.T. or rt: room temperature
[1033] s or sec: second
[1034] sat: saturated
[1035] SEMCl: chloromethyl-2-trimethylsilylethyl ether
[1036] SFC: supercritical fluid chromatography
[1037] SOCl₂: sulfur dichloride
[1038] tBuOK: potassium tert-butoxide
[1039] TBAB: tetrabutylammonium bromide
[1040] TBAF: tetrabutylammmonium fluoride
[1041] TBAI: tetrabutylammonium iodide
[1042] TEA: triethylamine
[1043] Tf: trifluoromethanesulfonate
[1044] TfAA, TFMSA or Tf₂O: trifluoromethanesulfonic anhydride
[1045] TFA: trifluoroacetic acid
[1046] TIBSCl: 2,4,6-triisopropylbenzenesulfonyl chloride
[1047] TIPS: triisopropylsilyl
[1048] THF: tetrahydrofuran
[1049] THP: tetrahydropyran
[1050] TLC: thin layer chromatography
[1051] TMEDA: tetramethylethylenediamine
[1052] pTSA: para-toluenesulfonic acid
[1053] UPLC: Ultra Performance Liquid Chromatography
[1054] wt: weight
[1055] Xantphos: 4,5-bis(diphenylphosphino)-9,9-dimethylxanthene

### Example 1: Preparation of Double-Stranded RNAi Oligonucleotides

### General Synthetic Methods

[1056] The following examples are intended to illustrate the disclosure and are not to be construed as being limitations thereon. Temperatures are given in degrees centigrade (C). If not mentioned otherwise, all evaporations are performed under reduced pressure, preferably between about 15 mm Hg and 100 mm Hg (=20-133 mbar). The structure of final products, intermediates and starting materials was confirmed by standard analytical methods, e.g., microanalysis and spectroscopic characteristics, e.g., MS, IR, NMR. Abbreviations used are those conventional in the art.

[1057] All starting materials, building blocks, reagents, acids, bases, dehydrating agents, solvents, and catalysts utilized to synthesis the nucleic acid or analogues thereof of the present disclosure are either commercially available or can be produced by organic synthesis methods known to one of ordinary skill in the art (METHODS OF ORGANIC SYNTHESIS, Thieme, Volume 21 (Houben-Weyl 4th Ed. 1952)). Further, the nucleic acid or analogues thereof of the present disclosure can be produced by organic synthesis methods known to one of ordinary skill in the art as shown in the following examples.

[1058] All reactions are carried out under nitrogen or argon unless otherwise stated.

[1059] Proton NMR (¹H NMR) was conducted in deuterated solvent. In certain nucleic acid or analogues thereof disclosed herein, one or more ¹H shifts overlap with residual proteo solvent signals; these signals have not been reported in the experimental provided hereinafter.

[1060] As depicted in the Examples below, in certain exemplary embodiments, the nucleic acid or analogues thereof were prepared according to the following general procedures. It will be appreciated that, although the general methods depict the synthesis of certain nucleic acid or analogues thereof of the present disclosure, the following general methods, and other methods known to one of ordinary skill in the art, can be applied to all nucleic acid or analogues thereof and subclasses and species of each of these nucleic acid or analogues thereof, as described herein.

### Example 1a: Synthesis of 2-(2-((((6aR,8R,9R,9aR)-8-(6-benzamido-9H-purin-9-yl)-2,2,4,4-tetraisopropyltetrahydro-6H-furo[3,2-f][1,3,5,2,4]trioxadisilocin-9-yl)oxy)methoxy)ethoxy) ethan-1-ammonium formate (1-6)

[chemical structure]

[chemical structure]

[1062] A solution of compound 1-1 (25.00 g, 67.38 mmol) in 20 mL of DMF was treated with pyridine (11 mL, 134.67 mmol) and tetraisopropyldisiloxane dichloride (22.63 mL, 70.75 mmol) at 10° C. The resulting mixture was stirred at 25° C. for 3 h and quenched with 20% citric acid (50 mL). The aqueous layer was extracted with EtOAc (3×50 mL) and the combined organic layers were concentrated in vacuo. The crude residue was recrystallized from a mixture of MTBE and n-heptane (1:15, 320 mL) to afford compound 1-2 (37.20 g, 90%) as a white oily solid.

[1063] A solution of compound 1-2 (37.00 g, 60.33 mmol) in 20 mL of DMSO was treated with AcOH (20 mL, 317.20 mmol) and Ac₂O (15 mL, 156.68 mmol). The mixture was stirred at 25° C. for 15 h. The reaction was diluted with EtOAc (100 mL) and quenched with sat. K₂CO₃ (50 mL). The aqueous layer was extracted with EtOAc (3×50 mL). The combined organic layers were concentrated and recrystallized with ACN (30 mL) to afford compound 1-3 (15.65 g, 38.4%) as a white solid.

[1064] A solution of compound 1-3 (20.00 g, 29.72 mmol) in 120 mL of DCM was treated with Fmoc-amino-ethoxy ethanol (11.67 g, 35.66 mmol) at 25° C. The mixture was stirred to afford a clear solution and then treated with 4 Å molecular sieves (20.0 g), N-iodosuccinimide (8.02 g, 35.66 mmol), and TfOH (5.25 mL, 59.44 mmol). The mixture was stirred at 30° C. until the HPLC analysis indicated >95% consumption of compound 1-3. The reaction was quenched with TEA (6 mL) and filtered. The filtrate was diluted with EtOAc, washed with sat. NaHCO₃ (2×100 mL), sat. Na₂SO₃ (2×100 mL), and water (2×100 mL) and concentrated in vacuo to afford crude compound 1-4 (26.34 g, 93.9%) as a yellow solid, which was used directly for the next step without further purification.

[1065] A solution of compound 1-4 (26.34 g, 27.62 mmol) in a mixture of DCM/water (10:7, 170 mL) was treated with DBU (7.00 mL, 45.08 mmol) at 5° C. The mixture was stirred at 5-25° C. for 1 h. The organic layer was then separated, washed with water (100 mL), and diluted with DCM (130 mL). The solution was treated with fumaric acid (7.05 g, 60.76 mmol) and 4 Å molecular sieves (26.34 g) in four portions. The mixture was stirred for 1 h, concentrated, and recrystallized from a mixture of MTBE and DCM (5:1) to afford compound 1-6 (14.74 g, 62.9%) as a white solid: ¹H NMR (400 MHz, d₆-DMSO) 8.73 (s, 1H), 8.58 (s, 1H), 8.15-8.02 (m, 2H), 7.65-7.60 (m, 1H), 7.59-7.51 (m, 2H), 6.52 (s, 2H), 6.15 (s, 1H), 5.08-4.90 (m, 3H), 4.83-4.78 (m, 1H), 4.15-3.90 (m, 3H), 3.79-3.65 (m, 2H), 2.98-2.85 (m, 6H), 1.20-0.95 (m, 28H).

### Example 1b: Synthesis of (2R,3R,4R,5R)-5-(6-benzamido-9H-purin-9-yl)-2-((bis(4-methoxyphenyl)(phenyl)methoxy)methyl)-4-((2-(2-[lipid]-amidoethoxy)ethoxy)methoxy) tetrahydrofuran-3-yl (2-cyanoethyl) diisopropylphosphoramidite (2-4a to 2-4e)

[chemical structure]

[chemical structure]

[1067] A solution of compound 1-6 (50.00 g, 59.01 mmol) in 150 mL of 2-methyltetrahydrofuran was washed with ice cold aqueous K₂HPO₄ (6%, 100 mL) and brine (20%, 2×100 mL). The organic layer was separated and treated with hexanoic acid (10.33 mL, 82.61 mmol), HATU (33.66 g, 88.52 mmol), and DMAP (10.81 g, 147.52 mmol) at 0° C. The resulting mixture was warmed to 25° C. and stirred for 1 h. The solution was washed with water (2×100 mL), brine (100 mL), and concentrated in vacuo to afford a crude residue. Flash chromatography on silica gel (1:1 hexanes/acetone) gave compound 2-1a (34.95 g, 71.5%) as a white solid.

[1068] A mixture of compound 2-1a (34.95 g, 42.19 mmol) and TEA (9.28 mL, 126.58 mmol) in 80 mL of THF was treated with triethylamine trihydrofluoride (20.61 mL, 126.58 mmol) dropwise at 10° C. The mixture was warmed to 25° C. and stirred for 2 h. The reaction was concentrated, dissolved in DCM (100 mL), and washed with sat. NaHCO₃ (5×20 mL) and brine (50 mL). The organic layer was concentrated in vacuo to afford crude compound 2-2a (24.72 g, 99%), which was used directly for the next step without further purification.

[1069] A solution of compound 2-2a (24.72 g, 42.18 mmol) in 50 mL of DCM was treated with N-methylmorpholine (18.54 mL, 168.67 mmol) and DMTr-Cl (15.69 g, 46.38 mmol). The mixture was stirred at 25° C. for 2 h and quenched with sat. NaHCO₃ (50 mL). The organic layer was separated, washed with water, concentrated to afford a slurry crude. Flash chromatography on silica gel (1:1 hexanes/acetone) gave compound 2-3a (30.05 g, 33.8 mmol, 79.9%) as a white solid.

[1070] A solution of compound 2-3a (25.00 g, 28.17 mmol) in 50 mL of DCM was treated with N-methylmorpholine (3.10 mL, 28.17 mmol) and tetrazole (0.67 mL, 14.09 mmol) under nitrogen atmosphere. Bis(diisopropylamino) chlorophosphine (9.02 g, 33.80 mmol) was added to the solution dropwise and the resulting mixture was stirred at 25° C. for 4 h. The reaction was quenched with water (15 mL), and the aqueous layer was extracted with DCM (3×50 mL). The combined organic layers were washed with sat. NaHCO₃ (50 mL), concentrated to afford a crude solid that was recrystallized from a mixture of DCM/MTBE/n-hexane (1:4:40) to afford compound 2-4a (25.52 g, 83.4%) as a white solid: ¹H NMR (400 MHz, d₆-DMSO) 11.25 (s, 1H), 8.65-8.60 (m, 2H), 8.09-8.02 (m, 2H), 7.71 (s, 1H), 7.67-7.60 (m, 1H), 7.59-7.51 (m, 2H), 7.38-7.34 (m, 2H), 7.30-7.25 (m, 7H), 6.85-6.79 (m, 4H), 6.23-6.20 (m, 1H), 5.23-5.14 (m, 1H), 4.80-4.69 (m, 3H), 4.33-4.23 (m, 2H), 3.90-3.78 (m, 1H), 3.75 (s, 6H), 3.74-3.52 (m, 3H), 3.50-3.20 (m, 6H), 3.14-3.09 (m, 2H), 3.09 (s, 1H), 2.82-2.80 (m, 1H), 2.65-2.60 (m, 1H), 2.05-1.96 (m, 2H), 1.50-1.39 (m, 2H), 1.31-1.10 (m, 14H), 1.08-1.05 (m, 2H), 0.85-0.79 (m, 3H); ³¹P NMR (162 MHz, d₆-DMSO) 149.43, 149.18.

[1071] Compound 2-4b, 2-4c, 2-4d, and 2-4e were prepared using similar procedures described above for compound 2-4a. Compound 2-4b was obtained (25.50 g, 85.4%) as a white solid: ¹H NMR (400 MHz, d₆-DMSO) 11.23 (s, 1H), 8.65-8.60 (m, 2H), 8.05-8.02 (m, 2H), 7.73-7.70 (m, 1H), 7.67-7.60 (m, 1H), 7.59-7.51 (m, 2H), 7.38-7.34 (m, 2H), 7.30-7.25 (m, 7H), 6.89-6.80 (m, 4H), 6.21-6.15 (m, 1H), 5.23-5.17 (m, 1H), 4.80-4.69 (m, 3H), 4.40-4.21 (m, 2H), 3.91-3.80 (m, 1H), 3.74 (s, 6H), 3.74-3.52 (m, 3H), 3.50-3.20 (m, 6H), 3.14-3.09 (m, 2H), 3.09 (s, 1H), 2.83-2.79 (m, 1H), 2.68-2.62 (m, 1H), 2.05-1.97 (m, 2H), 1.50-1.38 (m, 2H), 1.31-1.10 (m, 18H), 1.08-1.05 (m, 2H), 0.85-0.78 (m, 3H); ³¹P NMR (162 MHz, d₆-DMSO) 149.43, 149.19.

[1072] Compound 2-4c was obtained (36.60 g, 66.3%) as an off-white solid: ¹H NMR (400 MHz, d₆-DMSO) 11.22 (s, 1H), 8.64-8.59 (m, 2H), 8.05-8.00 (m, 2H), 7.73-7.70 (m, 1H), 7.67-7.60 (m, 1H), 7.59-7.51 (m, 2H), 7.38-7.34 (m, 2H), 7.30-7.25 (m, 7H), 6.89-6.80 (m, 4H), 6.21-6.15 (m, 1H), 5.25-5.17 (m, 1H), 4.80-4.69 (m, 3H), 4.40-4.21 (m, 2H), 3.91-3.80 (m, 1H), 3.74 (s, 6H), 3.74-3.50 (m, 3H), 3.50-3.20 (m, 6H), 3.14-3.09 (m, 2H), 3.09 (s, 1H), 2.83-2.79 (m, 1H), 2.68-2.62 (m, 1H), 2.05-1.99 (m, 2H), 1.50-1.38 (m, 2H), 1.33-1.12 (m, 38H), 1.08-1.05 (m, 2H), 0.86-0.80 (m, 3H); ³¹P NMR (162 MHz, d₆-DMSO) 149.42, 149.17.

[1073] Compound 2-4d was obtained (26.60 g, 72.9%) as an off-white solid: ¹H NMR (400 MHz, d₆-DMSO) 11.22 (s, 1H), 8.64-8.59 (m, 2H), 8.05-8.00 (m, 2H), 7.73-7.70 (m, 1H), 7.67-7.60 (m, 1H), 7.59-7.51 (m, 2H), 7.38-7.33 (m, 2H), 7.30-7.25 (m, 7H), 6.89-6.80 (m, 4H), 6.21-6.15 (m, 1H), 5.22-5.17 (m, 1H), 4.80-4.69 (m, 3H), 4.40-4.21 (m, 2H), 3.91-3.80 (m, 1H), 3.74 (s, 6H), 3.74-3.52 (m, 3H), 3.50-3.20 (m, 6H), 3.14-3.09 (m, 2H), 3.09 (s, 1H), 2.83-2.79 (m, 1H), 2.68-2.62 (m, 1H), 2.05-1.99 (m, 2H), 1.50-1.38 (m, 2H), 1.35-1.08 (m, 38H), 1.08-1.05 (m, 2H), 0.85-0.79 (m, 3H); ³¹P NMR (162 MHz, d₆-DMSO) 149.47, 149.22.

[1074] Compound 2-4e was obtained (38.10 g, 54.0%) as a white solid: ¹H NMR (400 MHz, d₆-DMSO) 11.21 (s, 1H), 8.64-8.59 (m, 2H), 8.05-8.00 (m, 2H), 7.73-7.70 (m, 1H), 7.67-7.60 (m, 1H), 7.59-7.51 (m, 2H), 7.38-7.34 (m, 2H), 7.30-7.25 (m, 7H), 6.89-6.80 (m, 4H), 6.21-6.15 (m, 1H), 5.23-5.17 (m, 1H), 4.80-4.69 (m, 3H), 4.40-4.21 (m, 2H), 3.91-3.80 (m, 1H), 3.73 (s, 6H), 3.74-3.52 (m, 3H), 3.47-3.22 (m, 6H), 3.14-3.09 (m, 2H), 3.09 (s, 1H), 2.83-2.79 (m, 1H), 2.68-2.62 (m, 1H), 2.05-1.99 (m, 2H), 1.50-1.38 (m, 2H), 1.35-1.06 (m, 46H), 1.08-1.06 (m, 2H), 0.85-0.77 (m, 3H); ³¹P NMR (162 MHz, d₆-DMSO) 149.41, 149.15.

### Example 2. Synthesis of GalXC RNAi Oligonucleotide-Lipid Conjugates

[chemical structure]

R₁COOH group represents fatty acid C8:0, C10:0, C11:0, C12:0, C14:0, C16:0, C17:0, C18:0, C18:1, C18:2, C22:5, C22:0, C24:0, C26:0, C22:6, C24:1, diacyl C16:0 or diacyl C18:1

[chemical structure]

[1076] Synthesis Sense 1 and Antisense 1 were prepared by solid-phase synthesis.

Synthesis of Conjugated Sense 1a-1i.

[1077] Conjugated Sense 1a was synthesized through post-syntenic conjugation approach. In Eppendorf tube 1, a solution of octanoic acid (0.58 mg, 4 umol) in DMA (0.75 mL) was treated with HATU (1.52 mg, 4 umol) at rt. In Eppendorf tube 2, a solution of oligo Sense 1 (10.00 mg, 0.8 umol) in H₂O (0.25 mL) was treated with DIPEA (1.39 uL, 8 umol). The solution in Eppendorf tube 1 was added to the Eppendorf tube 2 and mixed using Thermomixer at rt. After the reaction was completed indicated by LC-MS analysis, the reaction mixture was diluted with 5 mL of water and purified by revers phase)(Bridge C18 column using a 5-95% gradient of 100 mM TEAA in ACN and H₂O. The product fractions were concentrated under reduced pressure using Genevac. The combined residual solvent was dialyzed against water (1×), saline (1×), and water (3×) using Amicon® Ultra-15 Centrifugal (3K). The Amicon membrane was washed with water (3×2 mL) and the combined solvents were then lyophilized to afford an amorphous white solid of Conjugated Sense 1a (6.43 mg, 64% yield).

[1078] Conjugated Sense 1b-1i were prepared using similar procedures as described for the synthesis of Conjugated Sense 1a and obtained in 42%-69% yields.

Annealing of Duplex 1a-1j.

[1079] Conjugated Sense 1a (10 mg, measured by weight) was dissolved in 0.5 mL deionized water to prepare a 20 mg/mL solution. Antisense 1 (10 mg, measured by OD) was dissolved in 0.5 mL deionized water to prepare a 20 mg/mL solution, which was used for the titration of the conjugated sense and quantification of the duplex amount. Based on the calculation of molar amounts of both conjugated sense and antisense, a proportion of required Antisense 1 was added to the Conjugated Sense 1a solution. The resulting mixture was stirred at 95° C. for 5 min and allowed to cool down to rt. The annealing progress was monitored by ion-exchange HPLC. Based on the annealing progress, several proportions of Antisense 1 were further added to complete the annealing with >95% purity. The solution was lyophilized to afford Duplex 1a (C8) and its amount was calculated based on the molar amount of the antisense consumed in the annealing.

[1080] Duplex 1b-1i were prepared using the same procedures as described for the annealing of Duplex 1a (C8).

[1081] The following Scheme 1-2 depicts the synthesis of Nicked tetraloop GalXC conjugates with mono-lipid on the loop. Post-synthetic conjugation was realized through Cu-catalyzed alkyne-azide cycloaddition reaction.

[chemical structure]

[1082] Sense 1B and Antisense 1B were prepared by solid-phase synthesis. Synthesis of Conjugated Sense 1j.

[1083] In Eppendorf tube 1, a solution of oligo (10.00 mg, 0.8 umol) in a 3:1 mixture of DMA/H₂O (0.5 mL) was treated with the lipid linker azide (11.26 mg, 4 umol). In Eppendorf tube 2, CuBr dimethyl sulfide (1.64 mg, 8 umol) was dissolved in ACN (0.5 mL). Both solutions were degassed for 10 min by bubbling N₂ through them. The ACN solution of CuBrSMe₂ was then added into tube 1 and the resulting mixture was stirred at 40° C. After the reaction was completed indicated by LC-MS analysis, the reaction mixture was diluted with 0.5 M EDTA (2 mL) and dialyzed against water (2×) using a Amicon® Ultra-15 Centrifugal (3K). The reaction crude was purified by revers phase)(Bridge C18 column using a 5-95% gradient of 100 mM TEAA in ACN (with 30% IPA spiked in) and H₂O. The product fractions were concentrated under reduced pressure using Genevac. The combined residual solvent was dialyzed against water (1×), saline (1×), and water (3×) using Amicon® Ultra-15 Centrifugal (3K). The Amicon membrane was washed with water (3×2 mL) and the combined solvents were lyophilized to afford an amorphous white solid of Conjugated Sense 1j (6.90 mg, 57% yield).

[1084] Duplex 1j (PEG2K-diacyl C18) was prepared using the same procedures as described for the annealing of Duplex 1a (C8).

[1085] The following Scheme 1-3 depicts the synthesis of Nicked tetraloop GalXC conjugates with di-lipid on the loop using post-synthetic conjugation approach.

[chemical structure]

[chemical structure]

Sense 2 and Antisense 2 were prepared by solid-phase synthesis.

[1086] Conjugated Sense 2a and 2b were prepared using similar procedures as described for the synthesis of Conjugated Sense 1a but with 10 eq of lipid, 10 eq of HATU, and 20 eq of DIPEA.

[1087] Duplex 2a (2XC11) and 2b (2XC22) were prepared using the same procedures as described for the annealing of Duplex 1a (C8).

[1088] The following Scheme 1-4 depicts the synthesis of GalXC of fully phosphorothioated stem-loop conjugated with mono-lipid using post-synthetic conjugation approach.

[chemical structure]

[1089] Sense 3 and Antisense 3 were prepared by solid-phase synthesis.

[1090] Conjugated Sense 3a was prepared using similar procedures as described for the synthesis of Conjugated Sense 1a and obtained in a 65% yield.

[1091] Duplex 3a (PS-C22) was prepared using the same procedures as described for the annealing of Duplex 1a (C8).

[1092] The following Scheme 1-5 depicts the synthesis of GalXC of short sense conjugated with mono-lipid using post-synthetic conjugation approach.

[chemical structure]

[1093] Sense 4 and Antisense 4 were prepared by solid-phase synthesis.

[1094] Conjugated Sense 4a was prepared using similar procedures as described for the synthesis of Conjugated Sense 1a and obtained in a 74% yield.

[1095] Duplex 4a (SS-C22) was prepared using the same procedures as described for the annealing of Duplex 1a (C8).

[1096] The following Scheme 1-6 depicts the synthesis of Nicked tetraloop GalXC conjugated with tri-adamantane moiety on the loop using post-synthetic conjugation approach.

[chemical structure]

[chemical structure]

[1097] Sense 5 and Antisense 5 were prepared by solid-phase synthesis.

[1098] Conjugated Sense 5a and 5b were prepared using similar procedures as described for the synthesis of Conjugated Sense 1a and obtained in 42%-73% yields.

[1099] Duplex 5a (3Xadamantane) and Duplex 5b (3Xacetyladamantane) were prepared using the same procedures as described for the annealing of Duplex 1a (C8).

[1100] The following scheme 1-7 depicts an example of solid phase synthesis of Nicked tetraloop GalXC conjugated with lipid(s) on the loop.

[chemical structure]

[1101] Synthesis of Conjugated Sense 6.

[1102] Conjugated Sense 6 was prepared by solid-phase synthesis using a commercial oligo synthesizer. The oligonucleotides were synthesized using 2′-modified nucleoside phosphoramidites, such as 2′-F or 2′-OMe, and 2′-diethoxymethanol linked fatty acid amide nucleoside phosphoramidites. Oligonucleotide synthesis was conducted on a solid support in the 3′ to 5′ direction using a standard oligonucleotide synthesis protocol. In these efforts, 5-ethylthio-1H-tetrazole (ETT) was used as an activator for the coupling reaction. Iodine solution was used for phosphite triester oxidation. 3-(Dimethylaminomethylidene)amino-3H-1,2,4-dithiazole-3-thione (DDTT) was used for the formation of phosphorothioate linkages. Synthesized oligonucleotides were treated with concentrated aqueous ammonium for 10 h. The ammonia was removed from the suspension and the solid support residues were removed by filtration. The crude oligonucleotide was treated with TEAA, analyzed, and purified by strong anion exchange high performance liquid chromatography (SAX-HPLC). The fractions were combined and dialyzed against water (3×), saline (1×), and water (3×) using Amicon® Ultra-15 Centrifugal (3K). The remaining solvent was then lyophilized to afford the desired Conjugated Sense 6.

[1103] Duplex 6 was prepared using the same procedures as described for the annealing of Duplex 1a (C8).

[chemical structure]

### Synthesis of Conjugated Sense 7a and 7b

[1104] Conjugated Sense 7a and Sense 7b were obtained using the same method or a substantially similar method to the synthesis of Conjugated Sense 5.

### Synthesis Example of Duplex 7a and 7b

[1105] Duplex 7a and Duplex 7b were obtained using the same method or a substantially similar method to the synthesis of Duplex 5.

[chemical structure]

[chemical structure]

### Synthesis of Conjugated Sense 8a and 8b

[1106] Conjugated Sense 8a and Sense 8b were obtained using the same method or a substantially similar method to the synthesis of Conjugated Sense 5.

### Synthesis Example of Duplex 8a and 8b

[1107] Duplex 8a and Duplex 8b were obtained using the same method or a substantially similar method to the synthesis of Duplex 5.

[1108] The following Scheme 1-10 depicts the synthesis of GalXC of short sense and short stem loop conjugated with mono-lipid using post-synthetic conjugation approach.

[chemical structure]

### Synthesis of Sense 9a

[1109] Conjugated Sense 9a was obtained using the same method or a substantially similar method to the synthesis of Conjugated Sense 5.

Synthesis example of Duplex 9a

[1110] Duplex 9a was obtained using the same method or a substantially similar method to the synthesis of Duplex 5.

[1111] The following Scheme 1-11 depicts the synthesis of GalXC conjugated with mono-lipid at 5′-end using post-synthetic conjugation approach.

[chemical structure]

[chemical structure]

### Synthesis of Conjugated Sense 10a

[1112] Conjugated Sense 10a was obtained using the same method or a substantially similar method to the synthesis of Conjugated Sense 5.

### Synthesis Example of Duplex 10a

[1113] Duplex 10a was obtained using the same method or a substantially similar method to the synthesis of Duplex 5.

[1114] The following Scheme 1-12a and 1-12b depict the synthesis of GalXC with blunt end conjugated with mono-lipid at 3′-end or 5′-end using post-synthetic conjugation approach.

[chemical structure]

[chemical structure]

[chemical structure]

### Synthesis of Conjugated Sense 11a and 12a

[1115] Conjugated Sense 11a and 12a were obtained using the same method or a substantially similar method to the synthesis of Conjugated Sense 5.

### Synthesis Example of Duplex 11a and 12a

[1116] Duplex 11a and 12a were obtained using the same method or a substantially similar method to the synthesis of Duplex 5.

[1117] Conjugates Duplex 8D and Duplex 9D were obtained using the same method or a substantially similar method to the synthesis of Duplex 5.

[1118] Later, acyl chains were conjugated to a nucleic acid inhibitor molecule that targets the STAT3 gene, a gene that is expressed in the tissues of interest. A passenger strand with 2′-amine linkers [ademA] was used for post solid phase conjugation. Different types of lipids were conjugated using the same chemistry to generate a series of conjugates (FIGS. 1A and 1B). SAR studies were performed to identify a lipid conjugate that could be used to deliver payloads to the tissues of interest in order to mediate target knockdown.

### Example 3: In Vivo Tumor Models

[1119] Briefly, 6-8-week-old immunocompromised (Nude)/Immunocompetent (C57BL/6) mice were injected subcutaneously with 2×10⁶ Pan02 cells (mouse pancreatic cancer cell line), 2×10⁶ B16F10 cells (mouse melanoma cell line) or 5×10⁶ LS411N cells (human colorectal cancer cell line) under the right shoulder. When the tumors reached a volume of 300-500 mm³, they were randomized into different cohorts and subjected to dosing with GalXC lipid conjugates. Each GalXC lipid conjugate was dosed subcutaneously at a total volume of 10 mL/kg. Mouse pancreatic cell line Pan02 was obtained from NCI and mouse melanoma cell line Bl6F10 and human colorectal cell line LS411N were obtained from ATCC (Manassas, VA). All cells were grown in RPMI/DMEM medium supplemented with 10% FBS. Pan02, Bl6F10 and LS411N tumors are known to maintain very suppressive, or cold, tumor microenvironments.

### Example 4: Differential Delivery of GalXC Lipid Conjugates to Different Components of the Tumor Microenvironment

[1120] To elucidate differential delivery of GalXC lipid conjugates, human xenograft tumors (LS411N cells) were implanted in nude mice, as described in Example 3. At about two weeks post implant, when tumor volume reached ˜300-400 mm³, mice were randomized into 6 groups (n=3) and treated with a single dose of either Phosphate Buffered Saline (PBS) or an GalXC-ALDH2-lipid conjugate as outlined in Scheme 1 of Example 2 (GalXC-C8, GalXC-C18, GalXC-C18-1, GalXC-C18-2 or GalXC-C22) at 10 mg/kg. Three days post subcutaneous injection, tumors were collected and analyzed by qPCR to determine mRNA levels of human ALDH2 and mouse Aldh2. In bulk tumor tissue, mRNA expression levels of the human ALDH2 gene remained at baseline across all groups, however mouse Aldh2 mRNA levels were decreased by ˜40-50% across all groups treated with GalXC-ALDH2-lipid conjugates, including C18, C18-1, C18-2 and C22, except C8 as compared to the PBS control (FIGS. 2A and 2B). These data suggest that the GalXC-ALDH2-lipid conjugates did not mediate siRNA delivery and target knockdown in human tumor epithelium, but mediated siRNA delivery to components in tumor microenvironment in order to facilitate target knockdown. To further confirm this observation, a follow-up study was run in the same tumor type. LS411N human xenograft tumors were implanted in nude mice, as described above. After randomization into 12 groups, GalXC-ALDH2-C22 conjugate at 10, 25 and 50 mg/kg and PBS control, mice were treated with a single subcutaneous dose of test article accordingly.

TABLE 2
GalXC-lipid conjugate ALDH2 Tool Molecules

| | | | Sense | Antisense | |
|---|---|---|---|---|---|
| | | | Strand | strand | |
| | | Sequence | SEQ | SEQ | |
| Oligo | DP # | Type | ID NO | ID NO | Conjugate |
| GalXC- | DP15543P: | Unmodified | 1 | 2 | C18 |
| ALDH2-C18 | DP11674G | Modified | 3 | 4 | C18 |
| GalXC- | DP15545P: | Unmodified | 5 | 6 | C22 |
| ALDH2-C22 | DP11674G | Modified | 7 | 8 | C22 |

[1121] Dose response and duration of activity were determined by measuring the mouse and human Aldh2/ALDH2 mRNA levels on days 3, 7- and 14 post treatment. In parallel, the activity of GalXC-ALDH2-C22 in non-tumor bearing mice was also investigated at 25 mg/kg dose level on days 3 and 14 post treatment (FIG. 4B). As observed previously, no target knockdown was observed in human tumor epithelial parenchyma at any dose level, including the high dose of 50 mg/kg (FIG. 3A). However, robust knockdown of Aldh2 mRNA was observed in mouse host tissue (tumor microenvironment) (FIG. 3B). Nadir for mRNA knockdown in the murine TME was observed at one-week post-dose. ED₅₀ at nadir was observed to be between 10 and 25 mg/kg with the max knockdown was greater than 75%. Robust mRNA knockdown was maintained for at least two weeks post-dose. In the same study, tumor draining lymph nodes (axillary and inguinal) from the mice were also collected and analyzed by qPCR for mRNA levels of mouse Aldh2. As demonstrated in FIG. 4A, potent and durable activity was observed regardless of dose level. The ED₅₀ in tumor draining lymph nodes (TdLN) was determined to be <10 mg/kg. The absence of a dose related response suggests that there was saturation of activity even at the lowest dose level of GalXC-ALDH2-C22. FIG. 4B shows that no target knockdown was observed in the lymph nodes (LNs) of non-tumor bearing mice treated with GalXC-ALDH2-C22. Without being bound by theory, it is possible that lack of activity in control LNs suggests that the activity demonstrated in TdLN is tumor mediated and that GalXC-ALDH-C22 conjugate gained access to the LNs through the tumor lymphatic drainage. To examine whether target knockdown was also observed across different lymph nodes types in tumor bearing mice, the non-draining lymph nodes (LNs on the opposite side of the body to the TdLN), were also collected and analyzed for target mRNA levels at all 3 time points. As shown in FIG. 5A, the target mRNA levels in non-TdLN were reduced 20% on day 3, 50% on day 7 and reached the same level (60%) of knockdown as observed in TdLN on day 14. The level of immune suppressive characteristics of cell populations was assessed by determining the ratio of mRNA markers CD11b and Pdl1 in a given cell population. In this experiment, the murine mRNA ratio of these markers was found to be significantly lower in non-TdLN compared to TdLN on day 14 (FIG. 5B), suggesting that the cell population present in TdLN is more suppressive than the cell population present in Non-TdLN.

### Example 5: GalXC Lipid Conjugates Mediate Target Knockdown in Tumor-Associated Myeloid Cells

[1122] Myeloid-derived suppressor cells (MDSCs) are a heterogeneous population of cells that expand during tumorigenesis and which have the remarkable ability to suppress T-cell responses. Collectively, MDSCs are characterized by the co-expression of cell surface or mRNA markers CD11b (a marker for the myeloid cells of the macrophage lineage) and Gr-1 (a marker for the myeloid lineage differentiation antigen) and denoted as CD11b⁺Gr-1⁺ cells. Gr-1 is further comprised of 2 components Ly6G and Ly6C. MDSCs consist of two subsets: Granulocytic MDSC (G-MDSC), further characterized as CD11b⁺Ly6G⁺Ly6C^{lo}, and monocytic MDSC (M-MDSC) characterized as CD11b⁺Ly6G⁻Ly6C^{hi}. To elucidate the cell populations susceptible to target knockdown mediated by GalXC lipid conjugates in mouse host tissue, specifically to investigate target knockdown in the CD11b⁺ MDSCs of the TME, LS411N human xenograft tumors were implanted in nude mice as described in Example 3. After randomization mice were treated with a single dose of either GalXC-ALDH2-C22 conjugate at 25 mg/kg or PBS. At 3 days post dose, the murine host CD11b⁺ cells (myeloid derived suppressor cells or MDSC) and human tumor cells were isolated from single cell suspensions of tumors through positive and negative magnetic separation methods, respectively, using MACS separation technology (Miltenyi Biotec Inc, Auburn, CA). To isolate the CD11b positive cells, a single cell suspension of tumor was made using gentle MACS dissociator. CD11b positive cells in the single cell suspension were then magnetically labeled with MACS microbeads and enriched by passing through MACS columns and subsequently eluting the retained labeled cells in the column as positively selected fractions (CD11b MicroBeads UltraPure, mouse kit Cat #130-126-725). For tumor cell separation, non-target cells in the cell suspension were magnetically labeled with a cocktail of microbeads and passed through the MACS columns. During this process, the unwanted labeled cells were retained in the column and the unlabeled target cells (tumor cells) were collected in the flow-through as pure fraction. (Tumor Cell Isolation Kit, human Cat #130-108-339). CD11b⁺ cells were also isolated from the single cell suspensions of spleens of normal mice to compare the suppressive activity of the CD11b⁺ populations from different tissue types. Assuming comparable Aldh2 expression across cell types, CD11b+ MDSC preps were shown to be >90% pure. Upon isolation of the immune cell population, CD11b and Arg1 (markers characterizing immune suppression capabilities) mRNA levels were measured in both populations and the relative levels determined. In this analysis, CD11b mRNA was set to 100% in tumor and spleen subpopulations. While Arg1 was highly expressed in isolated MDSCs, it was not expressed (Ct>35) in spleen myeloid cells using the same affinity separation protocol, suggesting that the MDSCs in TME have high immune suppressive capabilities as compared to other myeloid derived cells, as this is one of the mechanisms that MDSCs use to inactivate tumor T-cells to suppress antitumor immune responses (FIG. 6). To determine if the GalXC-ALDH2-C22 mediated target knockdown was observed in the isolated CD11b⁺ cells and/or tumor cells, qPCR was performed, and the Aldh2/ALDH2 mRNA levels were determined. As demonstrated in FIGS. 7A and 7B, there was roughly 42% target knockdown observed in isolated CD11b⁺ cells, however there was no target knockdown observed in the isolated tumor cells. These data confirm the observation previously made in data collected from bulk tumor samples.

### Example 6: Using SAR to Identify a GalXC Lipid Conjugate Favorable for Delivery of siRNA to the Tumor Microenvironment and Tumor Draining Lymph Nodes

[1123] To identify a lipid conjugate with the most favorable properties to deliver payload and mediate target knockdown with the highest selectivity to myeloid cells in TME, a series of GalXC lipid conjugates as demonstrated in Scheme 1 (C16, C18, C22 and C24) were generated. To investigate these test articles, Pan02 murine pancreatic tumor cells were implanted in nude mice. When the tumors reached a volume of 300-400 mm³, the mice were randomized into groups and treated with either a single dose of PBS or a GalXC lipid conjugate (C16, C18, C22 and C24) at 25 mg/kg. Target knockdown was assessed on day 3 in bulk tumor and in liver (FIGS. 8A and 8B) to identify a GalXC lipid a conjugate with selectivity towards the target tissue (MDSCs) as compared to normal liver tissue. On day 3 post dose, Aldh2 mRNA levels in the tumors of all the treatment groups were decreased to a similar degree. There was a trend observed in the Aldh2 levels in livers of GalXC-ALDH2-lipid conjugate groups of a correlation of higher lipid acyl chain length with lower target knockdown (C24>C22>C18>C16), suggesting that these conjugates may use different mechanisms to traffic to TME versus Liver. Since the shorter lipid acyl chain conjugates C16 and C18 seem to be more liver sparing without compromising TME activity, as compared to longer acyl chain conjugates C22 and C24, the C16/C18 lipid conjugates were further explored in a separate study to further characterize their activity. Pan02 tumor bearing mice were treated with a single subcutaneous dose of GalXC-ALDH2-C16 or GalXC-ALDH-C18 at 25 mg/kg, or PBS and activity was monitored in bulk tumor tissue and TdLN on days 7 and 14. As shown in FIGS. 8C and 8D, the C18 conjugate outperformed C16 in target knockdown in bulk tumor at both time points. Although both test articles showed similar activity in TdLN on day 7, the C16 conjugate mediated activity was significantly reduced on day 14 while C18 mediated activity was maintained. Based on these data, the GalXC-ALDH2-C18 conjugate was selected for further studies.

### Example 7: Differences in the Onset of Activity and Dose-Dependence in Myeloid Derived Suppressor Cell Subsets

[1124] While it has been demonstrated GalXC-ALDH2-lipid conjugates mediate delivery and silence the Aldh2 gene in CD11b⁺ cells, it is critical to determine whether knockdown is mediated in either of the cell types or in both subsets of cells. Since these cell population subsets use different mechanisms to exert immune suppressive activity, it is important to identify which cell populations the GalXC lipid conjugates show activity toward to identify appropriate therapeutic targets. As demonstrated in the literature, signaling through GM-CSF along with STAT3 or STAT5 plays a key role in recruiting granulocytic-MDSCs (G-MDSCs) to the TME and is heavily involved in their expansion and suppression by increasing the FATP2 receptors (SLC27A2; gene encoding FATP2) on G-MDSC and allowing for efficient uptake of long chain fatty acids, according to recent findings (Veglia et al, NATURE (2019) 569:73-78(2019), one of the fatty acids, arachidonic acid, when metabolized to PGE₂ by COX-2 enzyme (gene encoding COX-2; PTGS2), is involved in T-cell suppression. Monocytic MDSCs (M-MDSCs), on the other hand, are also recruited to the TME from bone marrow where they become suppressive. M-MDSCs are known to have a higher-level expression of lipid trafficking receptors such as SCARB1 and LDLR that are likely to be involving in lipid uptake. Once each of the myeloid cell subsets become suppressive, they heavily express suppression associated markers such as ARG1, TGFβ, IDO, ROS and many others.

[1125] To determine whether the GalXC lipid conjugates mediate knockdown in either G-MDSC or M-MDSC cells or both, the gentle MACS magnetic separation method was used to isolate these cells as outlined for CD11b cell separation. As described above, a single cell suspension of tumor was made using gentle MACS dissociator. The Ly-6G⁺ fraction (or G-MDSC) was then isolated from the single cell suspension by magnetically labeling the Ly6G+ cells with MACS microbeads and passing through MACS columns and subsequently eluting the labeled cells as positively selected fractions. For separation of M-MDSCs (Ly6G⁻Gr-1⁺), the Gr-1⁺ cells present in the remaining flow through after Ly6G separation were magnetically labeled with MACS microbeads and passed through MACS columns to isolate the pure fraction by positive selection (Miltenyi Biotec Inc, Auburn CA, MDSC kit Cat #130-094-538). Through multiple positive and negative selection steps, pure MDSC subpopulations were isolated. These isolated populations were characterized by measuring multiple key markers that are expressed when G-MDSCs are differentiated from M-MDSCs as demonstrated in FIGS. 9 and 10. mRNA markers Ly6G, CxCr2, Slc27a2 and Ptgs2 are preferentially expressed by G-MDSCs and not by M-MDSCs. Expression of specific markers such as CxCr2, Scl27a2 and Ptgs2 suggest the recruitment and suppression activity of G-MDSCs in the TME. Likewise, mRNA markers Ly6C, Scarb1, Ldlr and Arg1 are highly expressed by M-MDSCs (FIGS. 11 and 12) compared to G-MDSCs. Higher expression of lipid trafficking receptors such as Scarb1 and Ldlr in M-MDSCs may play key role in lipid uptake. These mRNA marker profiles of isolated cell subpopulations were found to be consistent with the literature.

[1126] To identify in which cell populations knockdown can be mediated, Pan02 tumors were grown in nude mice as described in Example 3. After randomization into treatment groups mice received a single dose of either with GalXC-ALDH2-C18 at 25 mg/kg or a PBS control. At 3 days post treatment, tumors were collected, and the G-MDSC and M-MDSC populations were isolated. qPCR was used to determine the target mRNA levels. At this dose level, ˜40% Aldh2 mRNA knockdown was observed in only the G-MDSC subset and not in the M-MDSC subset. A follow-up study conducted in the same manner with a different tumor model, Bl6F10 (murine melanoma tumor) was performed to assess target knockdown pattern across tumor types. Bl6F10 tumors were implanted into nude mice as in Example 3 and when the tumors reached a volume of ˜300 mm³ size, the mice were randomized into treatment groups and treated with a single dose of the GalXC-ALDH2-C18 conjugate at 25 mg/kg, or PBS. At 3 days post treatment, mRNA levels were analyzed as described previously. As shown in FIGS. 13A and 13B, Aldh2 knockdown was observed only in G-MDSCs collected from both Pan02 and Bl6F10 tumors. To understand further how the dose level of GalXC lipid conjugate plays a role in delivery, the higher dose of 50 mg/kg was included in Pan02 tumor bearing mice and target knockdown was monitored on days 3 and 7. As shown in FIG. 13C, at a higher dose, the target knockdown in the G-MDSC population remained the same as the knockdown observed with 25 mg/kg. In addition, there was roughly 50% knockdown observed in the M-MDSC subset as well. The activity in each cell subset was maintained for a week post dose (FIG. 13D) suggesting that the delivery could be happening to G-MDSC first, likely through the FATP2 receptors, and once that population is saturated delivery shifts to the M-MDSCs (through Scarb1 and Ldlr) to mediate knockdown in this cell type. This suggests that the onset of activity and dose dependence maybe different between these two MDSC cell subsets.

### Example 8: Tissue Specific Targets in MDSC Cell Populations and Tumor Draining Lymph Nodes

[1127] The data above demonstrate that the two MDSC subsets mediate immune suppression through different mechanisms. While CXCR2, SCL27A2 and PTGS2 are identified as specific potential targets on G-MDSCs, and PD-L1 would be a more specific target for cells residing in the TdLN, there are few targets that are expressed on both subsets of MDSC cells in the TME and cell types residing in TdLN. STAT3 is one such target that is expressed in all tissues of interest (i.e., tumor cells and immune cells in the tumor microenvironment). Expression of STAT3 was measured in Pan02 tumors (FIGS. 14A-14C). STAT3 is involved in immune suppression with examples abundantly reported in literature. Targeting STAT3 transcription through an RNAi mechanism could potentially overcome the challenges in the development of pharmacological STAT3 inhibitors. For these reasons STAT3 was selected as a proof-of-concept target to demonstrate tissue specific activity in the tissues of interest. STAT3 sequences were designed in the GalXC format with described modification patterns and screening for target knockdown in liver tissue was performed in normal CD-1 mice. Eighteen STAT3-GalXC conjugates (Table 3) were dosed once subcutaneously at 3 mg/kg.

TABLE 3
GalXC Compound Candidates for Identifying Tool Compounds for
Proof-of-concept Studies in Mice:

| | | | Sense | Antisense | |
|---|---|---|---|---|---|
| | | | strand | strand | |
| | | Sequence | SEQ | SEQ | Con- |
| Oligo | DP # | Type | ID NO | ID NO | jugate |
| GalXC-STAT3- | DP21679P: | Unmodified | 9 | 10 | GalNAc |
| 838 | DP21678G | Modified | 11 | 12 | GalNAc |
| GalXC-STAT3- | DP21697P: | Unmodified | 13 | 14 | GalNAc |
| 1390 | DP21696G | Modified | 15 | 16 | GalNAc |
| GalXC-STAT3- | DP21677P: | Unmodified | 17 | 18 | GalNAc |
| 1394 | DP21676G | Modified | 19 | 20 | GalNAc |
| GalXC-STAT3- | DP21691P: | Unmodified | 21 | 22 | GalNAc |
| 1398 | DP21690G | Modified | 23 | 24 | GalNAc |
| GalXC-STAT3- | DP21671P: | Unmodified | 25 | 26 | GalNAc |
| 1399 | DP21670G | Modified | 27 | 28 | GalNAc |
| GalXC-STAT3- | DP21673P: | Unmodified | 29 | 30 | GalNAc |
| 1400 | DP21672G | Modified | 31 | 32 | GalNAc |
| GalXC-STAT3- | DP21687P: | Unmodified | 33 | 34 | GalNAc |
| 1401 | DP21686G | Modified | 35 | 36 | GalNAc |
| GalXC-STAT3- | DP21675P: | Unmodified | 37 | 38 | GalNAc |
| 1402 | DP21674G | Modified | 39 | 40 | GalNAc |
| GalXC-STAT3- | DP21701P: | Unmodified | 41 | 42 | GalNAc |
| 1759 | DP21700G | Modified | 43 | 44 | GalNAc |
| GalXC-STAT3- | DP21689P: | Unmodified | 45 | 46 | GalNAc |
| 2029 | DP21688G | Modified | 47 | 48 | GalNAc |
| GalXC-STAT3- | DP21693P: | Unmodified | 49 | 50 | GalNAc |
| 2034 | DP21692G | Modified | 51 | 52 | GalNAc |
| GalXC-STAT3- | DP21699P: | Unmodified | 53 | 54 | GalNAc |
| 2448 | DP21698G | Modified | 55 | 56 | GalNAc |
| GalXC-STAT3- | DP21695P: | Unmodified | 57 | 58 | GalNAc |
| 2527 | DP21694G | Modified | 59 | 60 | GalNAc |
| GalXC-STAT3- | DP21683P: | Unmodified | 61 | 62 | GalNAc |
| 4107 | DP21682G | Modified | 63 | 64 | GalNAc |
| GalXC-STAT3- | DP21669P: | Unmodified | 65 | 66 | GalNAc |
| 4110 | DP21668G | Modified | 67 | 68 | GalNAc |
| GalXC-STAT3- | DP21667P: | Unmodified | 69 | 70 | GalNAc |
| 4123 | DP21666G | Modified | 71 | 72 | GalNAc |
| GalXC-STAT3- | DP21685P: | Unmodified | 73 | 74 | GalNAc |
| 4435 | DP21684G | Modified | 75 | 76 | GalNAc |
| GalXC-STAT3- | DP21681P: | Unmodified | 77 | 78 | GalNAc |
| 4474 | DP21680G | Modified | 79 | 80 | GalNAc |

### Modification Key for Table 3

| Symbol | Modification/linkage |
|---|---|
| mX | 2′-O-methyl modified nucleotide |
| fX | 2′-fluoro modified nucleotide |
| -S- | phosphorothioate linkage |
| — | phosphodiester linkage |
| [MePhosphonate-4O-mX] | 4′-O-monomethylphosphonate-2′-O-methyl |
| | modified nucleotide |
| ademX-GalNAc | 2′-aminodiethoxymethanol-nucleotide- |
| | GalNAc (GalNAc-conjugated nucleotide) |

[1129] Five days post injection, livers were collected and subjected to mRNA analysis by qPCR. As a result of the screen, four sequences (GalXC-STAT3-838, GalXC-STAT3-1402, GalXC-STAT3-4110 and GalXC-STAT3-4123) that showed >85% target knockdown in liver were selected for further evaluation (FIG. 15A). Of these sequences three were identified as mouse specific and one was identified as human-mouse cross-reactive. These 4 sequences were further screened in CD-1 mice at 3 different doses (0.3, 1 and 3 mg/kg) to assess the dose response. GalXC-STAT3-4110 and 4123 were identified as the most potent sequences after the dose response screen, each with ED₅₀ of 0.3 mg/kg and thus these molecules were selected for further studies (FIG. 15B). C18 lipid conjugation was performed for both GalXC-STAT3-4110 or 4123 for proof-of-concept studies (Table 4).

TABLE 4
GalXC-STAT3 Lipid Conjugates

| SEQ ID | Oligonucleotide | Sequence Type | Ligand |
|---|---|---|---|
| 81 | GalXC-STAT3-4110-C18 | Modified Sense strand | C18 |
| 82 | | Modified Antisense strand | C18 |
| 83 | GalXC-STAT3-4123-C18 | Modified Sense strand | C18 |
| 84 | | Modified Antisense strand | C18 |

TABLE 5
GalXC-STAT3 Lipid Conjugates

| | Sequence | Sense strand | Antisense strand | |
|---|---|---|---|---|
| Oligo | Type | SEQ ID NO | SEQ ID NO | Conjugate |
| GalXC-STAT3- | Unmodified | 65 | 66 | C18 |
| 4110-C18 | Modified | 67 | 68 | C18 |
| GalXC-STAT3- | Unmodified | 69 | 70 | C18 |
| 4123-C18 | Modified | 71 | 72 | C18 |

### Modification Key for Tables 2, 4 and 5

| Symbol | Modification/linkage |
|---|---|
| mX | 2′-O-methyl modified nucleotide |
| fX | 2′-fluoro modified nucleotide |
| -S- | phosphorothioate linkage |
| — | phosphodiester linkage |
| [MePhosphonate-4O-mX] | 4′-O-monomethylphosphonate-2′-O-methyl |
| | modified nucleotide |
| adem X-C# | 2′-aminodiethoxymethanol-nucleotide- |
| | hydrocarbon chain (Lipid conjugate attached |
| | to a nucleotide (e.g. C16 or C18)) |

[1131] To evaluate the performance of GalXC-STAT3-C18 conjugates, Pan02 tumors were implanted in nude mice and upon reaching sufficient tumor volume mice were subjected to randomization as previously described. Mice received either a single dose of GalXC-STAT3-C18 4110 and 4123 subcutaneously at 25 mg/kg, 50 mg/kg, or PBS. At 3 days post injection, bulk tumors were collected. MDSC subsets were isolated as described in Example 5 and target mRNA was analyzed by qPCR (FIGS. 16A and 16B). Stat3 mRNA levels were reduced by ˜40% in G-MDSC and M-MDSCs by GalXC-STAT3-C18-4123. GalXC-STAT3-C18-4110 reduced the Stat3 mRNA levels only by 20% in both MDSC subsets. It is worth noting that the Aldh2 levels were reduced only in G-MDSC by the GalXC-ALDH2-lipid conjugates at the given dose and time point and the level of knockdown was comparable to the reduction of Stat3 levels in G-MDSC that were observed in the current experiment. Stat3 levels in M-MDSCs were reduced after GalXC-STAT3-C18 as compared to no reduction of Aldh2 levels in M-MDSC after GalXC-ALDH2-lipid conjugate treatment. The higher overall Aldh2 expression levels in M-MDSC compared to Stat3 levels may explain the difference in activity.

[1132] To understand how the dose level of GalXC-STAT3-C18 conjugates plays a role in trafficking of these molecules to different tissues and cell subsets, a follow-up study was performed as previously described with the same tumor model. Pan02 tumor bearing mice were treated with a single subcutaneous dose of either GalXC-STAT3-C18-4123 at 50 mg/kg, or PBS and Stat3 mRNA levels were measured after 3 days. The Stat3 knockdown in G-MDSC was not significantly altered as compared to the knockdown observed at the 25 mg/kg dose, however there was a significant improvement in Stat3 silencing observed in M-MDSC subset at this same dose level. In parallel study performed as previously described, Stat3 knockdown was assessed in bulk tumors and TdLNs on day 7 (FIGS. 17A and 17B). Dose dependent Stat3 mRNA knockdown was observed in bulk tumor with both GalXC-STAT3-C18 sequences. In TdLNs Stat3 mRNA levels were reduced by ˜60-65% by GalXC-STAT3-C18-4123, ˜25-30% by GalXC-STAT3-C18-4110 at both doses suggesting a saturation effect at these dose levels. Based on the data, GalXC-STAT3-C18-4123 was selected for further efficacy evaluations in immunocompetent mice.

### Example 9: STAT3 Inhibition Decreases the PD-L1 Levels in MDSCs and Mediates Acute Tumor Effects

[1133] The transcriptional signature of phosphorylated STAT3 has been positively correlated with PD-L1 expression in tumors (Song et al, JOURNAL OF CELL PHYSIOLOGY (2020), Zerdes et al, CANCERS (2019), Song et al, BLOOD (2018). To extrapolate this correlation to STAT3 expressed by MDSCs, isolated populations of MDSCs treated with either PBS or a GalXC-STAT3 conjugate were assayed for Pdl1 mRNA. Pdl1 mRNA levels were decreased by ˜80% in both G-MDSC and M-MDSC populations treated with either 25 or 50 mg/kg of a GalXC-STAT3 (FIG. 18A). The Pdl1 levels were also dramatically reduced in TdLN after treatment with the GalXC-STAT3 conjugate, specifically GalXC-STAT3-C18-4123 (FIG. 18B). These data suggest a potential for downstream immunomodulation of PD-L1 after knockdown of STAT3.

[1134] In a separate study, a Pan02 (murine pancreatic syngeneic model) tumor bearing C57BL/6 mice (n=4 per group) were treated subcutaneously with GalXC-STAT3-C18 conjugate following a split dosing model where all animals received a total dose of 50 mg/kg, dosed as either 25 mg/kg×2 doses or 12.5 mg/kg×4 doses. Tumors treated using the 25 mg/kg split dose showed acute tumor regression, even after the first dose (FIG. 19B). After the second dose of 25 mg/kg, tumors from 3 out of 4 mice regressed to sizes that were too small to be collected for further processing. The anti-tumor effect of the GalXC-STAT3 treatment was also observed in mice that received the 12.5 mg/kg split doses (FIG. 19A). These data suggest that STAT3 mediated regulation of PD-L1 results in an acute and dramatic effect on tumor growth in the Pan02 tumor bearing immunocompetent mice.

### Example 10: Preparation of Double-Stranded RNAi Oligonucleotides

### Oligonucleotide Synthesis and Purification

[1135] The double-stranded RNAi (dsRNA) oligonucleotides described in the foregoing Examples were chemically synthesized using methods described herein. Generally, dsRNAi oligonucleotides were synthesized using solid phase oligonucleotide synthesis methods as described for 19-23mer siRNAs (see, e.g., Scaringe et al. (1990) NUCLEIC ACIDS RES. 18:5433-41 and Usman et al. (1987) J. AM. CHEM. SOC. 109:p, 7845; see also, U.S. Pat. Nos. 5,804,683; 5,831,071; 5,998,203; 6,008,400; 6,111,086; 6,117,657; 6,353,098; 6,362,323; 6,437,117 and 6,469,158) in addition to using known phosphoramidite synthesis (see, e.g. Hughes and Ellington (2017) COLD SPRING HARE PERSPECT BIOL. 9(1):a023812; Beaucage S. L., Caruthers M. H. Studies on Nucleotide Chemistry V. Deoxynucleoside Phosphoramidites—A New Class of Key Intermediates for Deoxypolynucleotide Synthesis. TETRAHEDRON LETT. 1981; 22:1859-62. doi: 10.1016/S0040-4039(01)90461-7). dsRNAi oligonucleotides having a 19mer core sequence were formatted into constructs having a 25mer sense strand and a 27mer antisense strand to allow for processing by the RNAi machinery. The 19mer core sequence is complementary to a region in the STAT3 mRNA.

[1136] Individual RNA strands were synthesized and HPLC purified according to standard methods (Integrated DNA Technologies; Coralville, IA). For example, RNA oligonucleotides were synthesized using solid phase phosphoramidite chemistry, deprotected and desalted on NAP-5 columns (Amersham Pharmacia Biotech; Piscataway, NJ) using standard techniques (Damha & Olgivie (1993) METHODS MOL. BIOL. 20:81-114; Wincott et al. (1995) NUCLEIC ACIDS RES. 23:2677-2684). The oligomers were purified using ion-exchange high performance liquid chromatography (IE-HPLC) on an Amersham Source 15Q column (1.0 cm×25 cm; Amersham Pharmacia Biotech) using a 15 min step-linear gradient. The gradient varied from 90:10 Buffers A:B to 52:48 Buffers A:B, where Buffer A is 100 mM Tris pH 8.5 and Buffer B is 100 mM Tris pH 8.5, 1 M NaCl. Samples were monitored at 260 nm and peaks corresponding to the full-length oligonucleotide species were collected, pooled, desalted on NAP-5 columns, and lyophilized.

[1137] The purity of each oligomer was determined by capillary electrophoresis (CE) on a Beckman PACE 5000 (Beckman Coulter, Inc.; Fullerton, CA). The CE capillaries have a 100 μm inner diameter and contain ssDNA 100R Gel (Beckman-Coulter). Typically, about 0.6 nmole of oligonucleotide was injected into a capillary, run in an electric field of 444 V/cm and was detected by UV absorbance at 260 nm. Denaturing Tris-Borate-7 M-urea running buffer was purchased from Beckman-Coulter. Oligoribonucleotides were obtained that were at least 90% pure as assessed by CE for use in experiments described below. Compound identity was verified by matrix-assisted laser desorption ionization time-of-flight (MALDI-TOF) mass spectroscopy on a Voyager DE™ Biospectometry Work Station (Applied Biosystems; Foster City, CA) following the manufacturer's recommended protocol. Relative molecular masses of all oligomers were obtained, often within 0.2% of expected molecular mass.

### Preparation of Duplexes

[1138] Single strand RNA oligomers were resuspended (e.g., at 10011M concentration) in duplex buffer consisting of 100 mM potassium acetate, 30 mM HEPES, pH 7.5. Complementary sense and antisense strands were mixed in equal molar amounts to yield a final solution of, for example, 5011M duplex. Samples were heated to 100° C. for 5′ in RNA buffer (IDT) and were allowed to cool to room temperature before use. The dsRNA oligonucleotides were stored at ˜20° C. Single strand RNA oligomers were stored lyophilized or in nuclease-free water at −80° C.

### Example 11: Generation of STAT3-Targeting Double-Stranded RNAi Oligonucleotides

[1139] Identification of STAT3 mRNA Target Sequences

[1140] Signal transducer and activator of transcription 3 (STAT3) is a transcription factor involved in several development and disease functions. To generate RNAi oligonucleotide inhibitors of STAT3 expression, a computer-based algorithm was used to computationally identify STAT3 mRNA target sequences suitable for assaying inhibition of STAT3 expression by the RNAi pathway. The algorithm provided RNAi oligonucleotide guide (antisense) strand sequences each having a region of complementarity to a suitable STAT3 target sequence of human STAT3 mRNA (e.g., SEQ ID NO:1217; Table 6). Some of the guide strand sequences identified by the algorithm were also complementary to the corresponding STAT3 target sequence of monkey STAT3 mRNA (SEQ ID NO: 1218 Table 6) and/or mouse STAT3 mRNA. STAT3 RNAi oligonucleotides comprising a region of complementarity to homologous STAT3 mRNA target sequences with nucleotide sequence similarity are predicted to have the ability to target homologous STAT3 mRNAs.

TABLE 6
Sequences of Human and Monkey STAT3 mRNA

| Species | Ref Seq # | SEQ ID NO |
|---|---|---|
| Human (Hs) | NM_139276.3 | 1217 |
| M. Fascicularis (Mf) | XM_005584240.2 | 1218 |
| Mus Musculus (Mm) | NM_213659.3 | 1229 |

[1141] RNAi oligonucleotides (formatted as DsiRNA oligonucleotides) were generated as described in Example 10 for evaluation in vitro. Each DsiRNA was generated with the same modification pattern, and each with a unique guide strand having a region of complementarity to a STAT3 target sequence identified by SEQ ID NOs: 89-280. Modifications for the sense and anti-sense DsiRNA included the following (X—any nucleotide; m—2′-O-methyl modified nucleotide; r—ribosyl modified nucleotide):

### Sense Strand:

[1142] rXmXrXmXrXrXrXrXrXrXrXrXrXmXrXmXrXrXrXrXrXrXrXXX

### Anti-sense Strand:

[1143] mXmXmXmXrXrXrXrXrXrXmXrXmXrXrXrXrXrXrXrXrXrXmXrXmXmXmX

[1144] The ability of each of the modified DsiRNA in Table 7 to reduce STAT3 mRNA was measured using in vitro cell-based assays. Briefly, human hepatocyte (Huh7) cells expressing endogenous human STAT3 gene were transfected with each of the DsiRNAs listed in Table 7 at 1 nM in separate wells of a multi-well cell-culture plate. Cells were maintained for 24 hours following transfection with the modified DsiRNA, and then the amount of remaining STAT3 mRNA from the transfected cells was determined using TAQMAN®-based qPCR assays. Two qPCR assays, a 3′ assay and 5′ assay (Forward 1—SEQ ID NO:1219), Reverse 1—SEQ ID NO:1220, Probe 1—SEQ ID NO: 1221; Forward 2—SEQ ID NO: 1222, Reverse 2—SEQ ID NO: 1223, Probe 2—SEQ ID NO: 1224) were used to determine STAT3 mRNA levels as measured using PCR probes conjugated to 6-carboxy-fluorescein (FAM). Each primer pair was assayed for % remaining RNA as shown in Table 7 and FIG. 20. DsiRNAs resulting in less than or equal to 10% STAT3 mRNA remaining in DsiRNA-transfected cells when compared to mock-transfected cells were considered DsiRNA “hits”. The Huh7 cell-based assay evaluating the ability of the DsiRNAs listed in Table 7 to inhibit STAT3 expression identified several candidate DsiRNAs.

[1145] Taken together, these results show that DsiRNAs designed to target human STAT3 mRNA inhibit STAT3 expression in cells, as determined by a reduced amount of STAT3 mRNA in DsiRNA-transfected cells relative to control cells. These results demonstrate that the nucleotide sequences comprising the DsiRNA are useful for generating RNAi oligonucleotides to inhibit STAT3 expression. Further, these results demonstrate that multiple STAT3 mRNA target sequences are suitable for the RNAi-mediated inhibition of STAT3 expression.

TABLE 7
Analysis of STAT3 mRNA in Huh7 cells

| SED | SED | | | | | | | |
|---|---|---|---|---|---|---|---|---|
| ID NO | ID NO | | | | | | | |
| (Sense | (Anti-sense | DsiRNA | Average | | STAT3-5′ Assay | | STAT3-3′ Assay | |
| Strand) | Strand) | name | % remaining | SEM | % remaining | SEM | % remaining | SEM |
| 473 | 665 | 370 | 51.9 | 3.7 | 61.8 | 4.0 | 41.9 | 3.3 |
| 474 | 666 | 372 | 12.0 | 1.3 | 12.3 | 1.5 | 11.7 | 1.2 |
| 475 | 667 | 424 | 5.9 | 1.5 | 5.3 | 1.7 | 6.5 | 1.2 |
| 476 | 668 | 425 | 4.4 | 1.0 | 4.7 | 0.8 | 4.2 | 1.2 |
| 477 | 669 | 426 | 4.6 | 1.2 | 2.1 | 1.0 | 7.2 | 1.5 |
| 478 | 670 | 429 | 5.5 | 1.0 | 4.2 | 0.6 | 6.9 | 1.3 |
| 479 | 671 | 430 | 19.0 | 3.9 | 19.3 | 5.0 | 18.7 | 2.7 |
| 480 | 672 | 432 | 8.8 | 2.5 | 13.3 | 4.2 | 4.4 | 0.8 |
| 481 | 673 | 433 | 27.6 | 2.9 | 27.6 | 3.6 | 27.5 | 2.2 |
| 482 | 674 | 460 | 20.1 | 3.1 | 24.5 | 3.7 | 15.6 | 2.5 |
| 483 | 675 | 461 | 12.9 | 1.9 | 12.4 | 2.0 | 13.5 | 1.9 |
| 484 | 676 | 462 | 32.2 | 2.9 | 32.7 | 2.9 | 31.6 | 2.9 |
| 485 | 677 | 492 | 33.8 | 2.3 | 30.3 | 1.6 | 37.3 | 3.0 |
| 486 | 678 | 678 | 11.7 | 2.0 | 11.7 | 2.3 | 11.8 | 1.6 |
| 487 | 679 | 681 | 12.5 | 2.3 | 10.4 | 2.0 | 14.6 | 2.5 |
| 488 | 680 | 715 | 9.5 | 0.8 | 10.4 | 0.9 | 8.7 | 0.7 |
| 489 | 681 | 716 | 11.2 | 1.1 | 12.5 | 1.4 | 9.9 | 0.7 |
| 490 | 682 | 717 | 8.4 | 1.5 | 8.0 | 1.4 | 8.7 | 1.6 |
| 491 | 683 | 720 | 11.4 | 1.7 | 12.4 | 1.8 | 10.4 | 1.5 |
| 492 | 684 | 721 | 7.5 | 0.9 | 7.3 | 0.8 | 7.6 | 0.9 |
| 493 | 685 | 722 | 13.3 | 2.0 | 13.5 | 2.1 | 13.1 | 2.0 |
| 494 | 686 | 723 | 16.7 | 3.2 | 18.9 | 4.5 | 14.4 | 1.9 |
| 495 | 687 | 724 | 13.6 | 1.7 | 14.2 | 2.0 | 12.9 | 1.5 |
| 496 | 688 | 768 | 12.1 | 2.0 | 13.1 | 2.2 | 11.0 | 1.8 |
| 497 | 689 | 771 | 43.2 | 3.9 | 38.4 | 3.3 | 48.0 | 4.6 |
| 498 | 690 | 773 | 142.6 | 42.3 | 138.3 | 44.1 | 146.9 | 40.4 |
| 499 | 691 | 1000 | 19.3 | 2.9 | 22.0 | 3.9 | 16.5 | 2.0 |
| 500 | 692 | 1001 | 12.1 | 1.6 | 13.3 | 1.7 | 11.0 | 1.4 |
| 501 | 693 | 1003 | 51.3 | 6.5 | 62.8 | 8.3 | 39.8 | 4.7 |
| 502 | 694 | 1006 | 13.0 | 3.9 | 12.3 | 4.2 | 13.6 | 3.7 |
| 503 | 695 | 1008 | 93.5 | 12.0 | 90.0 | 13.1 | 96.9 | 11.0 |
| 504 | 696 | 1009 | 30.1 | 3.2 | 29.9 | 3.7 | 30.4 | 2.8 |
| 505 | 697 | 1010 | 22.1 | 3.5 | 22.7 | 4.4 | 21.5 | 2.6 |
| 506 | 698 | 1047 | 43.7 | 6.3 | 45.8 | 6.8 | 41.6 | 5.7 |
| 507 | 699 | 1067 | 15.3 | 1.3 | 16.0 | 1.5 | 14.5 | 1.1 |
| 508 | 700 | 1068 | 3.6 | 0.7 | 2.5 | 0.8 | 4.8 | 0.7 |
| 509 | 701 | 1145 | 9.2 | 2.2 | 8.4 | 2.5 | 9.9 | 1.8 |
| 510 | 702 | 1151 | 12.4 | 2.1 | 13.0 | 2.4 | 11.9 | 1.9 |
| 511 | 703 | 1241 | 6.7 | 1.9 | 8.3 | 1.9 | 5.1 | 1.8 |
| 512 | 704 | 1268 | 14.3 | 3.0 | 15.6 | 3.8 | 13.0 | 2.2 |
| 513 | 705 | 1272 | 85.2 | 16.3 | 104.4 | 20.9 | 66.1 | 11.8 |
| 514 | 706 | 1273 | 15.1 | 3.3 | 17.3 | 3.9 | 12.8 | 2.7 |
| 515 | 707 | 1275 | 14.7 | 1.7 | 13.7 | 1.8 | 15.8 | 1.7 |
| 516 | 708 | 1277 | 21.7 | 2.0 | 22.5 | 1.7 | 20.9 | 2.3 |
| 517 | 709 | 1278 | 10.8 | 1.4 | 9.4 | 1.9 | 12.1 | 0.9 |
| 518 | 710 | 1279 | 6.8 | 0.7 | 6.3 | 0.7 | 7.3 | 0.8 |
| 519 | 711 | 1280 | 9.9 | 1.0 | 8.2 | 1.0 | 11.5 | 1.0 |
| 520 | 712 | 1281 | 8.6 | 1.1 | 6.7 | 0.9 | 10.5 | 1.4 |
| 521 | 713 | 1282 | 17.0 | 1.9 | 15.8 | 1.6 | 18.1 | 2.1 |
| 522 | 714 | 1283 | 12.8 | 1.5 | 11.3 | 1.4 | 14.2 | 1.7 |
| 523 | 715 | 1284 | 7.8 | 1.0 | 6.2 | 0.8 | 9.4 | 1.3 |
| 524 | 716 | 1286 | 5.5 | 0.4 | 3.9 | 0.5 | 7.0 | 0.4 |
| 525 | 717 | 1287 | 5.1 | 0.6 | 4.6 | 0.9 | 5.6 | 0.3 |
| 526 | 718 | 1292 | 6.4 | 0.8 | 5.3 | 0.6 | 7.6 | 1.1 |
| 527 | 719 | 1293 | 7.3 | 0.8 | 5.9 | 0.9 | 8.7 | 0.6 |
| 528 | 720 | 1299 | 33.4 | 3.0 | 35.8 | 2.7 | 30.9 | 3.2 |
| 529 | 721 | 1305 | 27.5 | 1.9 | 26.7 | 0.6 | 28.3 | 3.1 |
| 530 | 722 | 1383 | 20.8 | 2.2 | 17.4 | 2.3 | 24.3 | 2.1 |
| 531 | 723 | 1388 | 4.0 | 0.8 | 1.6 | 0.6 | 6.3 | 0.9 |
| 532 | 724 | 1427 | 11.0 | 1.5 | 8.6 | 2.0 | 13.3 | 1.0 |
| 533 | 725 | 1485 | 11.6 | 2.3 | 12.4 | 2.1 | 10.8 | 2.6 |
| 534 | 726 | 1584 | 80.0 | 7.3 | 80.7 | 8.2 | 79.4 | 6.5 |
| 535 | 727 | 1586 | 22.0 | 2.8 | 18.6 | 2.6 | 25.4 | 3.0 |
| 536 | 728 | 1670 | 4.0 | 0.5 | 2.6 | 0.4 | 5.4 | 0.6 |
| 537 | 729 | 1671 | 9.9 | 2.6 | 10.8 | 3.1 | 8.9 | 2.1 |
| 538 | 730 | 1672 | 2.8 | 0.8 | 3.6 | 1.2 | 2.1 | 0.5 |
| 539 | 731 | 1673 | 3.7 | 0.9 | 3.1 | 1.0 | 4.2 | 0.9 |
| 540 | 732 | 1674 | 5.2 | 1.5 | 5.0 | 1.7 | 5.4 | 1.3 |
| 541 | 733 | 1676 | 11.5 | 2.3 | 13.0 | 2.1 | 10.1 | 2.4 |
| 542 | 734 | 1813 | 8.8 | 2.1 | 6.9 | 2.2 | 10.7 | 2.0 |
| 543 | 735 | 1815 | 7.0 | 1.9 | 8.9 | 2.7 | 5.0 | 1.1 |
| 544 | 736 | 1817 | 21.2 | 3.5 | 22.8 | 3.6 | 19.6 | 3.5 |
| 545 | 737 | 1819 | 13.3 | 1.9 | 15.0 | 1.9 | 11.5 | 1.8 |
| 546 | 738 | 1904 | 58.3 | 7.3 | 73.2 | 8.7 | 43.4 | 5.9 |
| 547 | 739 | 1906 | 24.6 | 3.5 | 30.2 | 3.8 | 18.9 | 3.2 |
| 548 | 740 | 1907 | 9.7 | 1.4 | 9.4 | 1.9 | 9.9 | 0.9 |
| 549 | 741 | 1908 | 9.0 | 1.4 | 9.2 | 1.5 | 8.9 | 1.3 |
| 550 | 742 | 1909 | 68.6 | 6.7 | 79.9 | 7.5 | 57.4 | 6.0 |
| 551 | 743 | 1910 | 4.3 | 0.6 | 3.3 | 0.6 | 5.4 | 0.6 |
| 552 | 744 | 1911 | 20.4 | 1.6 | 20.6 | 1.7 | 20.2 | 1.6 |
| 553 | 745 | 1912 | 15.6 | 1.6 | 16.6 | 2.4 | 14.7 | 0.8 |
| 554 | 746 | 1913 | 9.4 | 1.0 | 10.1 | 0.9 | 8.8 | 1.1 |
| 555 | 747 | 1914 | 46.2 | 3.6 | 52.5 | 4.2 | 39.8 | 3.0 |
| 556 | 748 | 1916 | 12.9 | 2.0 | 13.3 | 2.2 | 12.4 | 1.7 |
| 557 | 749 | 1917 | 13.3 | 1.4 | 13.4 | 1.5 | 13.3 | 1.3 |
| 558 | 750 | 1919 | 45.6 | 5.5 | 54.0 | 7.0 | 37.1 | 4.0 |
| 559 | 751 | 1920 | 47.5 | 2.8 | 49.9 | 2.3 | 45.1 | 3.4 |
| 560 | 752 | 2024 | 27.1 | 5.9 | 29.5 | 7.1 | 24.7 | 4.6 |
| 561 | 753 | 2135 | 35.1 | 3.7 | 37.4 | 3.4 | 32.8 | 3.9 |
| 562 | 754 | 2136 | 8.6 | 2.1 | 6.9 | 2.0 | 10.3 | 2.2 |
| 563 | 755 | 2138 | 54.0 | 12.5 | 49.8 | 16.5 | 58.1 | 8.5 |
| 564 | 756 | 2139 | 2.9 | 0.6 | 2.8 | 0.7 | 3.1 | 0.6 |
| 565 | 757 | 2143 | 53.2 | 9.7 | 67.0 | 11.8 | 39.3 | 7.7 |
| 566 | 758 | 2144 | 6.2 | 1.6 | 5.1 | 1.3 | 7.2 | 1.9 |
| 567 | 759 | 2145 | 21.4 | 2.1 | 23.1 | 2.2 | 19.8 | 2.0 |
| 568 | 760 | 2146 | 55.3 | 5.0 | 56.7 | 6.3 | 54.0 | 3.7 |
| 569 | 761 | 2147 | 18.2 | 1.9 | 15.6 | 1.4 | 20.8 | 2.4 |
| 570 | 762 | 2148 | 20.2 | 2.5 | 20.7 | 3.1 | 19.8 | 1.9 |
| 571 | 763 | 2151 | 36.9 | 3.0 | 33.2 | 2.0 | 40.7 | 3.9 |
| 572 | 764 | 2153 | 17.1 | 1.9 | 17.3 | 2.2 | 17.0 | 1.6 |
| 573 | 765 | 2154 | 13.7 | 1.3 | 13.9 | 1.6 | 13.6 | 0.9 |
| 574 | 766 | 2159 | 33.6 | 2.2 | 29.7 | 1.9 | 37.5 | 2.6 |
| 575 | 767 | 2322 | 20.1 | 1.8 | 21.3 | 2.5 | 18.8 | 1.2 |
| 576 | 768 | 2325 | 20.6 | 2.6 | 23.7 | 2.7 | 17.5 | 2.5 |
| 577 | 769 | 2327 | 12.1 | 1.4 | 11.8 | 1.4 | 12.4 | 1.4 |
| 578 | 770 | 2329 | 36.8 | 3.0 | 40.3 | 3.3 | 33.4 | 2.8 |
| 579 | 771 | 2333 | 18.9 | 3.1 | 18.5 | 4.2 | 19.4 | 2.0 |
| 580 | 772 | 2335 | 12.5 | 1.9 | 10.1 | 1.8 | 14.9 | 2.1 |
| 581 | 773 | 2404 | 9.8 | 2.2 | 8.7 | 3.0 | 10.8 | 1.3 |
| 582 | 774 | 2405 | 6.1 | 1.3 | 5.9 | 1.1 | 6.4 | 1.4 |
| 583 | 775 | 2407 | 36.0 | 2.7 | 33.2 | 2.6 | 38.9 | 2.9 |
| 584 | 776 | 2408 | 9.3 | 2.0 | 8.6 | 1.9 | 10.0 | 2.0 |
| 585 | 777 | 2411 | 43.2 | 3.7 | 46.9 | 3.7 | 39.6 | 3.6 |
| 586 | 778 | 2412 | 6.1 | 1.2 | 5.3 | 1.4 | 7.0 | 1.0 |
| 587 | 779 | 2413 | 36.9 | 5.5 | 39.0 | 5.8 | 34.8 | 5.3 |
| 588 | 780 | 2416 | 28.6 | 4.9 | 30.4 | 5.6 | 26.7 | 4.2 |
| 589 | 781 | 2418 | 15.5 | 1.9 | 15.0 | 2.1 | 16.0 | 1.7 |
| 590 | 782 | 2422 | 81.2 | 10.1 | 84.5 | 11.5 | 77.9 | 8.8 |
| 591 | 783 | 2427 | 45.3 | 7.7 | 53.2 | 9.4 | 37.3 | 5.9 |
| 592 | 784 | 2612 | 64.9 | 11.5 | 79.1 | 14.0 | 50.6 | 9.0 |
| 593 | 785 | 2615 | 153.3 | 24.5 | 170.0 | 27.8 | 136.6 | 21.1 |
| 594 | 786 | 2616 | 37.3 | 3.8 | 40.0 | 4.5 | 34.5 | 3.1 |
| 595 | 787 | 2617 | 28.9 | 4.1 | 30.8 | 4.8 | 27.0 | 3.3 |
| 596 | 788 | 2622 | 94.8 | 6.4 | 91.1 | 5.7 | 98.5 | 7.1 |
| 597 | 789 | 2625 | 60.0 | 4.2 | 53.6 | 3.9 | 66.4 | 4.4 |
| 598 | 790 | 2626 | 43.4 | 2.9 | 41.3 | 2.6 | 45.5 | 3.1 |
| 599 | 791 | 2627 | 17.1 | 1.0 | 15.0 | 0.6 | 19.2 | 1.4 |
| 600 | 792 | 2692 | 14.2 | 1.9 | 14.0 | 1.6 | 14.3 | 2.1 |
| 601 | 793 | 2693 | 13.6 | 1.4 | 14.0 | 1.4 | 13.2 | 1.5 |
| 602 | 794 | 2715 | 24.9 | 1.8 | 23.5 | 1.9 | 26.2 | 1.8 |
| 603 | 795 | 2719 | 28.7 | 2.3 | 28.2 | 2.6 | 29.3 | 2.0 |
| 604 | 796 | 2721 | 32.2 | 2.3 | 33.2 | 2.0 | 31.1 | 2.6 |
| 605 | 797 | 2735 | 39.4 | 2.2 | 36.7 | 1.7 | 42.0 | 2.6 |
| 606 | 798 | 2741 | 31.3 | 3.9 | 34.6 | 4.1 | 28.1 | 3.8 |
| 607 | 799 | 2801 | 31.4 | 2.7 | 33.7 | 3.3 | 29.0 | 2.1 |
| 608 | 800 | 2803 | 26.5 | 1.9 | 29.8 | 2.1 | 23.1 | 1.7 |
| 609 | 801 | 2804 | 37.3 | 2.2 | 40.7 | 2.4 | 33.9 | 2.1 |
| 610 | 802 | 2806 | 77.7 | 5.2 | 77.1 | 5.0 | 78.2 | 5.3 |
| 611 | 803 | 2807 | 60.9 | 4.2 | 65.4 | 4.7 | 56.3 | 3.8 |
| 612 | 804 | 2808 | 44.7 | 2.9 | 45.9 | 3.5 | 43.5 | 2.4 |
| 613 | 805 | 2809 | 41.7 | 1.9 | 41.0 | 1.9 | 42.3 | 1.8 |
| 614 | 806 | 2810 | 28.6 | 2.9 | 28.3 | 3.1 | 28.8 | 2.6 |
| 615 | 807 | 2811 | 58.2 | 3.1 | 62.4 | 4.1 | 54.0 | 2.1 |
| 616 | 808 | 2812 | 44.4 | 2.3 | 50.1 | 2.4 | 38.7 | 2.2 |
| 617 | 809 | 2813 | 26.7 | 1.6 | 30.0 | 1.8 | 23.5 | 1.3 |
| 618 | 810 | 2846 | 26.4 | 2.3 | 27.8 | 2.1 | 25.0 | 2.5 |
| 619 | 811 | 2848 | 30.9 | 1.4 | 31.3 | 1.4 | 30.5 | 1.5 |
| 620 | 812 | 2849 | 28.5 | 2.8 | 29.6 | 3.0 | 27.4 | 2.7 |
| 621 | 813 | 2850 | 46.7 | 3.4 | 48.2 | 3.5 | 45.2 | 3.4 |
| 622 | 814 | 2851 | 28.7 | 3.3 | 28.0 | 3.3 | 29.4 | 3.3 |
| 623 | 815 | 2852 | 25.0 | 4.1 | 20.3 | 4.2 | 29.8 | 3.9 |
| 624 | 816 | 2853 | 109.6 | 6.9 | 109.9 | 6.6 | 109.2 | 7.1 |
| 625 | 817 | 2854 | 79.0 | 7.6 | 73.6 | 6.4 | 84.3 | 8.7 |
| 626 | 818 | 2855 | 53.0 | 8.6 | 44.8 | 7.4 | 61.1 | 9.8 |
| 627 | 819 | 2856 | 101.8 | 31.5 | 115.1 | 38.1 | 88.4 | 24.9 |
| 628 | 820 | 2857 | 39.3 | 10.0 | 47.1 | 9.7 | 31.6 | 10.3 |
| 629 | 821 | 2858 | 41.4 | 5.1 | 38.8 | 4.0 | 44.0 | 6.2 |
| 630 | 822 | 2859 | 29.8 | 7.4 | 31.1 | 7.5 | 28.5 | 7.3 |
| 631 | 823 | 2860 | 27.2 | 6.4 | 19.8 | 5.9 | 34.6 | 6.9 |
| 632 | 824 | 2861 | 30.8 | 3.8 | 29.5 | 5.0 | 32.1 | 2.6 |
| 633 | 825 | 2862 | 38.3 | 8.0 | 37.1 | 6.5 | 39.6 | 9.6 |
| 634 | 826 | 2863 | 33.5 | 8.0 | 29.4 | 6.2 | 37.6 | 9.8 |
| 635 | 827 | 2865 | 50.2 | 15.0 | 48.2 | 12.7 | 52.1 | 17.2 |
| 636 | 828 | 2867 | 27.3 | 4.0 | 25.0 | 3.8 | 29.6 | 4.1 |
| 637 | 829 | 2868 | 47.0 | 13.0 | 32.6 | 10.1 | 61.4 | 16.0 |
| 638 | 830 | 2975 | 30.7 | 6.7 | 30.6 | 6.7 | 30.9 | 6.8 |
| 639 | 831 | 2979 | 37.2 | 9.9 | 39.7 | 11.8 | 34.8 | 8.1 |
| 640 | 832 | 2985 | 48.7 | 13.2 | 28.0 | 12.3 | 69.3 | 14.2 |
| 641 | 833 | 3025 | 39.6 | 5.1 | 33.9 | 4.6 | 45.3 | 5.6 |
| 642 | 834 | 3037 | 49.0 | 10.8 | 46.3 | 11.5 | 51.7 | 10.1 |
| 643 | 835 | 3038 | 42.1 | 8.1 | 36.0 | 6.6 | 48.2 | 9.6 |
| 644 | 836 | 3039 | 74.7 | 12.0 | 72.4 | 13.0 | 77.0 | 11.0 |
| 645 | 837 | 3041 | 54.7 | 11.6 | 54.4 | 11.0 | 54.9 | 12.1 |
| 646 | 838 | 3042 | 46.9 | 8.2 | 54.3 | 11.3 | 39.6 | 5.1 |
| 647 | 839 | 3043 | 44.9 | 9.5 | 47.5 | 10.3 | 42.2 | 8.8 |
| 648 | 840 | 3225 | 40.3 | 8.4 | 40.7 | 8.8 | 39.9 | 8.0 |
| 649 | 841 | 3226 | 41.0 | 12.2 | 34.7 | 11.5 | 47.2 | 12.9 |
| 650 | 842 | 3605 | 30.6 | 8.1 | 24.7 | 8.3 | 36.5 | 7.9 |
| 651 | 843 | 3611 | 51.3 | 8.2 | 59.5 | 12.2 | 43.1 | 4.1 |
| 652 | 844 | 3906 | 32.1 | 6.8 | 28.6 | 7.9 | 35.5 | 5.6 |
| 653 | 845 | 4311 | 37.2 | 8.0 | 41.7 | 7.8 | 32.6 | 8.2 |
| 654 | 846 | 4314 | 31.0 | 4.5 | 39.9 | 5.2 | 22.0 | 3.8 |
| 655 | 847 | 4317 | 32.1 | 4.8 | 31.9 | 5.3 | 32.3 | 4.3 |
| 656 | 848 | 4321 | 34.1 | 6.7 | 37.3 | 6.2 | 30.9 | 7.2 |
| 657 | 849 | 4465 | 46.3 | 11.0 | 48.9 | 11.3 | 43.8 | 10.8 |
| 658 | 850 | 4479 | 33.1 | 7.5 | 34.8 | 7.8 | 31.4 | 7.1 |
| 659 | 851 | 4480 | 34.7 | 7.3 | 36.0 | 6.7 | 33.5 | 7.9 |
| 660 | 852 | 4831 | 49.1 | 4.0 | 44.4 | 4.9 | 53.7 | 3.2 |
| 661 | 853 | 4833 | 87.3 | 14.1 | 75.5 | 11.0 | 99.1 | 17.2 |
| 662 | 854 | 4836 | 139.9 | 17.1 | 124.8 | 15.2 | 154.9 | 19.1 |
| 663 | 855 | 4837 | 175.2 | 39.6 | 185.9 | 41.5 | 164.5 | 37.7 |
| 664 | 856 | 4909 | 27.6 | 3.2 | 30.6 | 3.8 | 24.7 | 2.6 |
| | | PC | 5.2 | 0.7 | 3.9 | 0.7 | 6.4 | 0.7 |
| | | (2412) | | | | | | |

[1146] Following the initial in vitro screen, 48 constructs were selected for dosing studies. Huh7 cells were treated for 24 hours with 0.05 nM, 0.3 nM, or 1 nM of oligonucleotide. mRNA was isolated and measured to determine a potent dose (FIG. 21A). Of the tested oligonucleotides, 34 sequences were selected for further testing in vivo (Table 8 and FIG. 21B).

TABLE 8
Analysis of STAT3 mRNA in Huh7 Dosing Study

| | 1 nM | | 0.3 nM | | 0.05 nM | |
|---|---|---|---|---|---|---|
| | % Remaining | Standard | % Remaining | Standard | % Remaining | Standard |
| | mRNA | Deviation | mRNA | Deviation | mRNA | Deviation |
| STAT3-372 | 18.7 | 2.0 | 62.7 | 7.0 | 81.3 | 20.0 |
| STAT3-715 | 15.7 | 1.2 | 38.4 | 5.0 | 106.5 | 11.5 |
| STAT3-716 | 17.6 | 1.3 | 36.1 | 3.4 | 99.3 | 10.2 |
| STAT3-717 | 16.6 | 1.0 | 23.9 | 3.3 | 78.8 | 8.1 |
| STAT3-720 | 18.6 | 2.3 | 33.2 | 4.3 | 111.2 | 9.0 |
| STAT3-721 | 17.8 | 1.8 | 31.4 | 2.9 | 84.6 | 9.2 |
| STAT3-722 | 17.8 | 2.4 | 56.3 | 5.4 | 109.4 | 11.7 |
| STAT3-724 | 18.5 | 2.1 | 57.2 | 6.8 | 119.7 | 11.1 |
| STAT3-768 | 15.6 | 2.3 | 36.0 | 4.8 | 78.4 | 10.4 |
| STAT3-1001 | 14.7 | 2.1 | 36.3 | 5.6 | 88.5 | 13.2 |
| STAT3-1006 | 25.2 | 3.0 | 48.5 | 5.2 | 105.4 | 14.0 |
| STAT3-1068 | 10.5 | 2.7 | 40.5 | 4.5 | 144.0 | 37.7 |
| STAT3-1145 | 15.7 | 2.4 | 29.3 | 4.6 | 61.6 | 4.3 |
| STAT3-1151 | 19.4 | 2.2 | 31.0 | 3.3 | 103.5 | 7.8 |
| STAT3-1268 | 19.7 | 1.8 | 33.1 | 3.1 | 101.6 | 10.4 |
| STAT3-1273 | 16.2 | 1.1 | 37.1 | 3.9 | 93.4 | 9.3 |
| STAT3-1275 | 29.1 | 2.5 | 61.6 | 21.5 | 89.1 | 8.3 |
| STAT3-1278 | 22.2 | 5.7 | 67.4 | 7.6 | 98.0 | 8.8 |
| STAT3-1279 | 15.3 | 2.0 | 44.9 | 5.1 | 83.6 | 7.1 |
| STAT3-1280 | 19.8 | 1.5 | 37.9 | 4.7 | 85.3 | 10.4 |
| STAT3-1281 | 20.2 | 2.2 | 36.3 | 4.5 | 71.9 | 7.0 |
| STAT3-1283 | 21.8 | 2.4 | 58.1 | 9.1 | 78.3 | 16.1 |
| STAT3-1284 | 18.8 | 2.6 | 42.7 | 9.3 | 75.2 | 8.0 |
| STAT3-1286 | 15.0 | 2.2 | 61.9 | 33.7 | 86.9 | 19.8 |
| STAT3-1287 | 13.7 | 2.0 | 33.3 | 10.9 | 85.0 | 36.0 |
| STAT3-1292 | 17.0 | 2.3 | 43.4 | 4.7 | 88.3 | 10.9 |
| STAT3-1293 | 15.0 | 2.1 | 32.8 | 3.1 | 72.9 | 7.9 |
| STAT3-1388 | 11.0 | 2.3 | 34.1 | 2.2 | 111.9 | 28.3 |
| STAT3-1427 | 23.5 | 2.3 | 78.1 | 5.4 | 90.6 | 15.0 |
| STAT3-1485 | 24.4 | 2.1 | 62.2 | 3.5 | 114.1 | 12.6 |
| STAT3-1676 | 31.5 | 4.2 | 54.1 | 4.4 | 102.3 | 9.4 |
| STAT3-1819 | 28.9 | 3.6 | 47.8 | 2.6 | 82.0 | 6.2 |
| STAT3-1907 | 29.5 | 3.8 | 51.2 | 3.4 | 96.7 | 13.5 |
| STAT3-1908 | 32.4 | 3.6 | 47.2 | 3.0 | 86.4 | 10.0 |
| STAT3-1910 | 15.9 | 2.2 | 43.8 | 4.1 | 91.6 | 19.2 |
| STAT3-1913 | 16.8 | 3.1 | 50.9 | 4.7 | 106.2 | 20.7 |
| STAT3-1916 | 27.4 | 3.2 | 57.4 | 3.2 | 153.0 | 18.1 |
| STAT3-1917 | 21.2 | 2.3 | 53.3 | 2.4 | 117.9 | 27.1 |
| STAT3-2139 | 9.9 | 3.3 | 29.1 | 3.2 | 91.8 | 15.7 |
| STAT3-2144 | 16.3 | 2.3 | 34.9 | 2.8 | 105.9 | 37.8 |
| STAT3-2154 | 23.2 | 2.6 | 37.1 | 3.4 | 113.4 | 24.6 |
| STAT3-2327 | 18.2 | 1.9 | 25.7 | 4.7 | 76.6 | 31.2 |
| STAT3-2335 | 30.5 | 3.6 | 49.7 | 4.0 | 84.3 | 28.4 |
| STAT3-2408 | 19.4 | 2.0 | 29.8 | 3.4 | 74.6 | 16.2 |
| STAT3-2412 | 17.0 | 4.1 | 30.3 | 1.9 | 105.7 | 29.5 |
| STAT3-2418 | 24.2 | 4.2 | 42.0 | 4.5 | 90.7 | 28.0 |
| STAT3-2692 | 17.8 | 2.3 | 43.8 | 4.2 | 91.1 | 19.3 |
| STAT3-2693 | 14.8 | 1.5 | 47.8 | 4.6 | 124.5 | 25.5 |

### Example 12: RNAi Oligonucleotide Inhibition of STAT3 In Vivo

[1147] The in vitro screening assay in Example 11 validated the ability of STAT3-targeting DsiRNAs to knock-down target mRNA. To confirm the ability of the RNAi oligonucleotides to knockdown STAT3 in vivo, an HDI mouse model was used. A subset of the DsiRNAs identified in Example 11 were used to generate corresponding double-stranded RNAi oligonucleotides comprising a nicked tetraloop GalNAc-conjugated structure (referred to herein as “GalNAc-conjugated STAT3 oligonucleotides” or “GalNAc-STAT3 oligonucleotides”) having a 36-mer passenger strand and a 22-mer guide strand (Table 10 and Table 11). Further, the nucleotide sequences comprising the passenger strand and guide strand have a distinct pattern of modified nucleotides and phosphorothioate linkages. Three of the nucleotides comprising the tetraloop were each conjugated to a GalNAc moiety (CAS #14131-60-3). The modification patterns used are illustrated below:

### Pattern 1

[1148] Sense Strand: 5′ mX-S-mX-mX-mX-mX-mX-mX-fX-fX-fX-fX[-mX-]₁₆-[ademX-GalNAc]-[ademX-GalNAc]-[ademX-GalNAc]-mX-mX-mX-mX-mX-mX 3′.

### Hybridized to:

### Antisense Strand: 5′ [MePhosphonate-4O-mX]-S-fX-S-fX-fX-fX-mX-fX-mX-mX-fX-mX-mX-mX-fX-mX-mX-mX-mX-mX-mX-S-mX-S-mX 3′

[1149] Or, represented as:
[1150] Sense Strand: [mXs][mX][mX][mX][mX][mX][mX][fX][fX][fX][fX][mX][mX][mX][mX][mX][mX][mX][mX][mX][mX][mX][mX][mX][mX][mX][mX][ademA-GalNAc][ademA-GalNAc][ademA-GalNAc][mX][mX][mX][mX][mX][mX]

### Hybridized to:

[1151] Antisense Strand: [MePhosphonate-4O-mXs][fXs][fX][fX][fX][mX][fX][mX][mX][fX][mX][mX][mX][fX][mX][mX][mX][mX][mX][mXs][mXs][mX]

### Pattern 2

[1152] Sense Strand: 5′ mX-S-mX-mX-mX-mX-mX-mX-fX-fX-fX-fX[-mX-]₁₆-[ademX-GalNAc]-[ademX-GalNAc]-[ademX-GalNAc]-mX-mX-mX-mX-mX-mX 3′.

### Hybridized to:

### Antisense Strand: 5′ [MePhosphonate-4O-mX]-S-fX-S-fX-S-fX-fX-mX-fX-mX-mX-fX-mX-mX-mX-fX-mX-mX-mX-mX-mX-mX-S-mX-S-mX 3′

[1153] Or, represented as:
[1154] Sense Strand: [mXs][mX][mX][mX][mX][mX][mX][fX][fX][fX][fX][mX][mX][mX][mX][mX][mX][mX][mX][mX][mX][mX][mX][mX][mX][mX][mX][ademA-GalNAc][ademA-GalNAc][ademA-GalNAc][mX][mX][mX][mX][mX][mX]

### Hybridized to:

[1155] Antisense Strand: [MePhosphonate-4O-mXs][fXs][fXs][fX][fX][mX][fX][mX][mX][fX][mX][mX][mX][fX][mX][mX][mX][mX][mX][mXs][mXs][mX]

### (Modification key: Table 9).

| | |
|---|---|
| Symbol | Modification/linkage |

Key 1

| | |
|---|---|
| mX | 2′-O-methyl modified nucleotide |
| fX | 2′-fluoro modified nucleotide |
| -S- | phosphorothioate linkage |
| — | phosphodiester linkage |
| [MePhosphonate-4O-mX] | 4′-O-monomethylphosphonate-2′-O-methyl |
| | modified nucleotide |
| ademA-GalNAc | 2′-aminodiethoxymethanol-adenine-GalNAc |
| | (GalNAc attached to an adenine nucleotide) |

Key 2

| | |
|---|---|
| [mXs] | 2′-O-methyl modified nucleotide with a |
| | phosphorothioate linkage to the |
| | neighboring nucleotide |
| [fXs] | 2′-fluoro modified nucleotide with a |
| | phosphorothioate linkage to the |
| | neighboring nucleotide |
| [mX] | 2′-O-methyl modified nucleotide with |
| | phosphodiester linkages to |
| | neighboring nucleotides |
| [fX] | 2′-fluoro modified nucleotide with |
| | phosphodiester linkages to |
| | neighboring nucleotides |

[1157] Oligonucleotides in Table 10 and Table 11 were evaluated in mice engineered to transiently express human STAT3 mRNA in hepatocytes of the mouse liver. Briefly, 6-8-week-old female CD-1 mice (n=4-5) were subcutaneously administered the indicated GalNAc-conjugated STAT3 oligonucleotides at a dose of 1 mg/kg formulated in PBS. A control group of mice (n=3-4) were administered only PBS. Three days later (72 hours), the mice were hydrodynamically injected (HDI) with a DNA plasmid encoding the full human STAT3 gene (25 μg) under control of a ubiquitous cytomegalovirus (CMV) promoter sequence. One day after introduction of the DNA plasmid, liver samples from HDI mice were collected. Total RNA derived from these HDI mice were subjected to qRT-PCR analysis to determine STAT3 mRNA levels as described in Example 11. mRNA levels were measured for human mRNA. The values were normalized for transfection efficiency using the NeoR gene included on the DNA plasmid. A benchmark control (STAT3-1388) comprising a different modification pattern, was used for both assays (Sense Strand SEQ ID NO: 1100; Antisense Strand SEQ ID NO: 1190).

TABLE 10
GalNAc-Conjugated STAT3 RNAi Oligonucleotides for HDI screen

| | Unmodified | Unmodified | Modified | Modified |
|---|---|---|---|---|
| | Sense | Antisense | Sense | Antisense |
| | Strand | strand | Strand | strand |
| STAT3-372 | 861 | 951 | 1041 | 1131 |
| STAT3-715 | 857 | 947 | 1037 | 1127 |
| STAT3-716 | 858 | 948 | 1038 | 1128 |
| STAT3-717 | 859 | 949 | 1039 | 1129 |
| STAT3-720 | 860 | 950 | 1040 | 1130 |
| STAT3-721 | 862 | 952 | 1042 | 1132 |
| STAT3-722 | 863 | 953 | 1043 | 1133 |
| STAT3-768 | 864 | 954 | 1044 | 1134 |
| STAT3-1001 | 865 | 955 | 1045 | 1135 |
| STAT3-1006 | 866 | 956 | 1046 | 1136 |
| STAT3-1145 | 867 | 957 | 1047 | 1137 |
| STAT3-1151 | 868 | 958 | 1048 | 1138 |
| STAT3-1268 | 869 | 959 | 1049 | 1139 |
| STAT3-1273 | 870 | 960 | 1050 | 1140 |
| STAT3-1279 | 871 | 961 | 1051 | 1141 |
| STAT3-1280 | 872 | 962 | 1052 | 1142 |
| STAT3-1281 | 873 | 963 | 1053 | 1143 |
| STAT3-1388 | 920 | 1010 | 1100 | 1190 |

TABLE 11
GalNAc-Conjugated STAT3 RNAi Oligonucleotides for HDI screen

| | Unmodified | Unmodified | Modified | Modified |
|---|---|---|---|---|
| | Sense | Antisense | Sense | Antisense |
| | Strand | strand | Strand | strand |
| STAT3-1284 | 874 | 964 | 1054 | 1144 |
| STAT3-1286 | 875 | 965 | 1055 | 1145 |
| STAT3-1287 | 876 | 966 | 1056 | 1146 |
| STAT3-1292 | 877 | 967 | 1057 | 1147 |
| STAT3-1293 | 878 | 968 | 1058 | 1148 |
| STAT3-1819 | 879 | 969 | 1059 | 1149 |
| STAT3-1908 | 880 | 970 | 1060 | 1150 |
| STAT3-1910 | 881 | 971 | 1061 | 1151 |
| STAT3-1913 | 882 | 972 | 1062 | 1152 |
| STAT3-2154 | 883 | 973 | 1063 | 1153 |
| STAT3-2327 | 884 | 974 | 1064 | 1154 |
| STAT3-2335 | 885 | 975 | 1065 | 1155 |
| STAT3-2418 | 886 | 976 | 1066 | 1156 |
| STAT3-2692 | 887 | 977 | 1067 | 1157 |
| STAT3-2693 | 888 | 978 | 1068 | 1158 |
| STAT3-2139 | 940 | 1030 | 1120 | 1210 |
| STAT3-2408 | 896 | 986 | 1076 | 1166 |
| STAT3-1388 | 920 | 1010 | 1100 | 1190 |

[1158] The results in FIGS. 22A and 22B demonstrate that GalNAc-conjugated STAT3 oligonucleotides designed to target human STAT3 mRNA inhibited human STAT3 mRNA expression in HDI mice, as determined by a reduction in the amount of human STAT3 mRNA expression in liver samples from HDI mice treated with GalNAc-conjugated STAT3 oligonucleotides relative to control HDI mice treated with only PBS.

[1159] A subset of the GalNAc-conjugated STAT3 oligonucleotides tested in FIGS. 22A and 22B were further validated in a dosing study. Specifically, dosing studies were carried out using nine GalNAc-conjugated STAT3 oligonucleotides (STAT3-715, STAT3-716, STAT3-717, STAT3-720, STAT3-721, STAT3-1145, STAT3-1286, STAT3-1286, and STAT3-1287). Mice were hydrodynamically injected as described above and treated with 0.1 mg/kg, 0.3 mg/kg, or 1 mg/kg of oligonucleotide. Livers were collected after one day, and STAT3 expression was measured to determine a potent dose (FIG. 23). All GalNAc-conjugated STAT3 oligonucleotides were able to reduce STAT3 expression at a 1 mg/kg dose and STAT3-1286 was able to reduce expression at a 0.3 mg/kg dose. Overall, the HDI studies identified several potential GalNAc-conjugated STAT3 oligonucleotides for inhibiting STAT3 expression in liver.

### Example 13: Species Specific RNAi Oligonucleotide Inhibition of STAT3 In Vivo

[1160] To confirm the ability of RNAi oligonucleotides to knockdown STAT3 in vivo, several cross species and species specific GalNAc-conjugated STAT3 oligonucleotides were generated. Specifically, triple common (targeting human, non-human primate, and mouse; Hs/Mf/Mm), human/mouse (Hs/Mm), and human specific (Hs) oligonucleotides were evaluated.

### Hs/Mf/Mm and Hs/Mm Commons

[1161] Mice expressing endogenous mouse STAT3 in the liver were subcutaneously injected at a dose of 3 mg/kg with the GalNAc-conjugated STAT3 oligonucleotides set forth in Table 12. Livers were collected after five days, and STAT3 expression was measured. Overall, the study identified several potential Hs/Mf/Mm GalNAc-conjugated STAT3 oligonucleotides for inhibiting STAT3 expression in liver (FIG. 24).

TABLE 12
GalNAc-Conjugated Human/Monkey/Mouse STAT3 RNAi
Oligonucleotides for Endogenous STAT3 screen.

| | Unmodified | Unmodified | Modified | Modified |
|---|---|---|---|---|
| | Sense | Antisense | Sense | Antisense |
| | Strand | strand | Strand | strand |
| STAT3-461 | 901 | 991 | 1081 | 1171 |
| STAT3-462 | 906 | 996 | 1086 | 1176 |
| STAT3-492 | 905 | 995 | 1085 | 1175 |
| STAT3-678 | 910 | 1000 | 1090 | 1180 |
| STAT3-681 | 909 | 999 | 1089 | 1179 |
| STAT3-771 | 908 | 998 | 1088 | 1178 |
| STAT3-773 | 904 | 994 | 1084 | 1174 |
| STAT3-1047 | 903 | 993 | 1083 | 1173 |
| STAT3-1584 | 902 | 992 | 1082 | 1172 |
| STAT3-1586 | 907 | 997 | 1087 | 1177 |
| STAT3-2146 | 898 | 988 | 1078 | 1168 |
| STAT3-2147 | 900 | 990 | 1080 | 1170 |
| STAT3-2148 | 899 | 989 | 1079 | 1169 |
| STAT3-2151 | 893 | 983 | 1073 | 1163 |
| STAT3-2159 | 897 | 987 | 1077 | 1167 |
| STAT3-2407 | 891 | 981 | 1071 | 1161 |
| STAT3-2408 | 896 | 986 | 1076 | 1166 |
| STAT3-2412 | 892 | 982 | 1072 | 1162 |
| STAT3-2626 | 890 | 980 | 1070 | 1160 |
| STAT3-2627 | 889 | 979 | 1069 | 1159 |
| STAT3-4833 | 912 | 1002 | 1092 | 1182 |
| STAT3-4836 | 895 | 985 | 1075 | 1165 |
| STAT3-4837 | 911 | 1001 | 1091 | 1181 |

[1162] Human/Mouse GalNAc-conjugated STAT3 oligonucleotides set forth in Table 13 were tested in mice endogenously expressing mouse STAT3. As described above, mice were subcutaneously injected at a dose of 3 mg/kg with oligonucleotide. Livers were collected after five days, and mouse STAT3 expression was measured. Overall, the study identified several potential Hs/Mm GalNAc-conjugated STAT3 oligonucleotides for inhibiting STAT3 expression in liver (FIG. 25).

TABLE 13
GalNAc-Conjugated Human/Mouse STAT3 RNAi
Oligonucleotides for Endogenous STAT3 Screen.

| | Unmodified | Unmodified | Modified | Modified |
|---|---|---|---|---|
| | Sense | Antisense | Sense | Antisense |
| | Strand | strand | Strand | strand |
| STAT3-1383 | 946 | 1036 | 1126 | 1216 |
| STAT3-2135 | 945 | 1035 | 1125 | 1206 |
| STAT3-2136 | 935 | 1025 | 1115 | 1205 |
| STAT3-2138 | 938 | 1028 | 1118 | 1208 |
| STAT3-2139 | 940 | 1030 | 1120 | 1210 |
| STAT3-2143 | 936 | 1026 | 1116 | 1206 |
| STAT3-2144 | 937 | 1027 | 1117 | 1207 |
| STAT3-2145 | 942 | 1032 | 1122 | 1212 |
| STAT3-2411 | 941 | 1031 | 1121 | 1211 |
| STAT3-2622 | 944 | 1034 | 1124 | 1214 |
| STAT3-4831 | 943 | 1033 | 1123 | 1213 |
| STAT3-4909 | 939 | 1029 | 1119 | 1209 |

[1163] A subset of the GalNAc-conjugated STAT3 oligonucleotides tested in FIGS. 24 and 25 were further validated in a dosing study. Specifically, dosing studies were carried out using ten GalNAc-conjugated STAT3 oligonucleotides (STAT3-2626, STAT3-2627, STAT3-2408, STAT3-2412, STAT3-2139, STAT3-4909, STAT3-461, STAT3-678, STAT3-2148, and STAT3-2144). Mice endogenously expressing mouse STAT3 were subcutaneously injected with 0.3 mg/kg, 1 mg/kg, or 3 mg/kg oligonucleotide. Livers were collected after five days, and mouse STAT3 expression was measured to determine a potent dose (FIGS. 26A and 26B). Overall, the endogenous mouse STAT3 expression studies identified several potential GalNAc-conjugated STAT3 oligonucleotides for inhibiting mouse STAT3 expression in liver.

### Hs Specific

[1164] Using the HDI model described in Example 12, human specific GalNAc-conjugated STAT3 oligonucleotides were evaluated. Specifically, 6-8-week-old female CD-1 mice (n=4-5) were subcutaneously administered the indicated GalNAc-conjugated STAT3 oligonucleotides (Table 14) at a dose of 1 mg/kg formulated in PBS. A control group of mice (n=3-4) were administered only PBS. Three days later (72 hours), the mice were hydrodynamically injected (HDI) with a DNA plasmid encoding the full human STAT3 gene (25 μg) under control of a ubiquitous cytomegalovirus (CMV) promoter sequence. One day after introduction of the DNA plasmid, liver samples from HDI mice were collected. Total RNA derived from these HDI mice were subjected to qRT-PCR analysis to determine STAT3 mRNA levels.

TABLE 14
GalNAc-Conjugated Human STAT3 RNAi Oligonucleotides
for Exogenous STAT3Screen.

| | Unmodified | Unmodified | Modified | Modified |
|---|---|---|---|---|
| | Sense | Antisense | Sense | Antisense |
| | Strand | strand | Strand | strand |
| STAT3-424 | 926 | 1016 | 1106 | 1196 |
| STAT3-425 | 932 | 1022 | 1112 | 1202 |
| STAT3-426 | 915 | 1005 | 1095 | 1185 |
| STAT3-429 | 921 | 1011 | 1101 | 1191 |
| STAT3-430 | 923 | 1013 | 1103 | 1193 |
| STAT3-432 | 924 | 1014 | 1104 | 1194 |
| STAT3-433 | 918 | 1008 | 1098 | 1188 |
| STAT3-1067 | 917 | 1007 | 1097 | 1187 |
| STAT3-1670 | 919 | 1009 | 1099 | 1189 |
| STAT3-1241 | 930 | 1020 | 1110 | 1200 |
| STAT3-1388 | 920 | 1010 | 1100 | 1190 |
| STAT3-1671 | 934 | 1024 | 1114 | 1204 |
| STAT3-1672 | 931 | 1021 | 1111 | 1201 |
| STAT3-1673 | 914 | 1004 | 1094 | 1184 |
| STAT3-1674 | 929 | 1019 | 1109 | 1199 |
| STAT3-1813 | 928 | 1018 | 1108 | 1198 |
| STAT3-1815 | 925 | 1015 | 1105 | 1195 |
| STAT3-1817 | 933 | 1023 | 1113 | 1203 |
| STAT3-2024 | 927 | 1017 | 1107 | 1197 |
| STAT3-2404 | 916 | 1006 | 1096 | 1186 |
| STAT3-2405 | 922 | 1012 | 1102 | 1192 |

[1165] The results in FIG. 27 demonstrate that GalNAc-conjugated STAT3 oligonucleotides designed to target human STAT3 mRNA inhibited human STAT3 mRNA expression in HDI mice, as determined by a reduction in the amount of human STAT3 mRNA expression in liver samples from HDI mice treated with GalNAc-conjugated STAT3 oligonucleotides relative to control HDI mice treated with only PBS.

[1166] A subset of the GalNAc-conjugated STAT3 oligonucleotides tested in FIG. 27 were further validated in a dosing study. Specifically, dosing studies were carried out using five GalNAc-conjugated STAT3 oligonucleotides (STAT3-426, STAT3-432, STAT3-1068, STAT3-1388, and STAT3-2404). Mice were hydrodynamically injected as described above and treated with 0.3 mg/kg, 1 mg/kg, or 3 mg/kg of oligonucleotide. Livers were collected after one day, and human STAT3 expression was measured to determine a potent dose (FIG. 28). A dose of 1 mg/kg was capable of reducing STAT3 mRNA by about 75%, thereby identifying several potential GalNAc-conjugated STAT3 oligonucleotides for inhibiting STAT3 expression in liver. The best 2 sequences from FIG. 23 and the best sequence from FIG. 28 are tested in the final HDI screen (FIG. 29).

### Example 14: Specific STAT3 Inhibition by GalNAc-Conjugated STAT3 Oligonucleotides

[1167] The specificity of the GalNAc-conjugated STAT3 oligonucleotides to inhibit STAT3 rather than a family member (e.g. STAT1) was measured. Specifically, Huh7 cells expressing endogenous STAT1 were treated for 24 hours with 0.05 nM, 0.3 nM, or 1 nM of a GalNAc-conjugated STAT3 oligonucleotide (STAT3-721, STAT3-1286, and STAT3-1388) using lipofectamine as transfection agent. The percent (%) remaining mRNA was measured compared to a mock control (PBS; no lipofectamine or siRNA) and UTR (un-transfected; treated with lipofectamine but no siRNA) (Table 15 and FIG. 30). STAT3 721 and 1286 did not downregulate human STAT1 but STAT3 1388 did (Table 15). Oligonucleotides did not downregulate STAT1 expression demonstrating a specificity for STAT3 with limited off-target effects for STAT1.

TABLE 15
STAT1 Expression

| Sample | Concentration | | % Expression | SEM |
|---|---|---|---|---|
| Mock | | | 100.0 | 10.8 |
| UTR | | | 107.5 | 8.4 |
| STAT3-721 | 0.05 | nM | 102.3 | 16.2 |
| | 0.3 | nM | 113.6 | 12.8 |
| | 1 | nM | 142.0 | 15.6 |
| STAT3-1286 | 0.05 | nM | 103.7 | 23.0 |
| | 0.3 | nM | 133.8 | 9.6 |
| | 1 | nM | 136.3 | 10.0 |
| STAT3-1388 | 0.05 | nM | 97.3 | 45.2 |
| | 0.3 | nM | 86.8 | 14.6 |
| | 1 | nM | 47.7 | 20.3 |

SEQUENCE LISTING

| | | | | SEQ |
|---|---|---|---|---|
| Name | Description | Species | Sequence | ID NO |
| GalXC- | Unmodified | | GGUGGAUGAAACUCAGUUUAGCAGCCG | 1 |
| ALDH2- | 36 mer | | AAAGGCUGC | |
| C18 | | | | |
| GalXC- | Unmodified | | UAAACUGAGUUUCAUCCACCGG | 2 |
| ALDH2- | 22 mer | | | |
| C18 | | | | |
| GalXC- | Modified | | [mGs][mG][fU][mG][fG][mA][mU][fG][mA] | 3 |
| ALDH2- | 36 mer | | [fA][mA][fC][fU][mC][fA][mG][fU][mU][mU] | |
| C18 | | | [mA][mG][mC][mA][mG][mC][mC][mG][ademA- | |
| | | | C18][mA][mA][mG][mG][mC] | |
| | | | [mU][mG][mC] | |
| GalXC- | Modified | | [MePhosphonate-4O- | 4 |
| ALDH2- | 22 mer | | mUs][fAs][fA][fA][fC][mU][fG][mA][mG][fU] | |
| C18 | | | [mU][mU][mC][fA][mU][fC][mC][mA][fC][mCs] | |
| | | | [mGs][mG] | |
| GalXC- | Unmodified | | GGUGGAUGAAACUCAGUUUAGCAGCCG | 5 |
| ALDH2- | 36 mer | | AAAGGCUGC | |
| C22 | | | | |
| GalXC- | Unmodified | | UAAACUGAGUUUCAUCCACCGG | 6 |
| ALDH2- | 22 mer | | | |
| C22 | | | | |
| GalXC- | Modified | | [mGs][mG][fU][mG][fG][mA][mU][fG][mA] | 7 |
| ALDH2- | 36 mer | | [fA][mA][fC][fU][mC][fA][mG][fU][mU][mU] | |
| C22 | | | [mA][mG][mC][mA][mG][mC][mC][mG][ademA- | |
| | | | C22][mA][mA][mG][mG][mC] | |
| | | | [mU][mG][mC] | |
| GalXC- | Modified | | [MePhosphonate-4O- | 8 |
| ALDH2- | 22 mer | | mUs][fAs][fA][fA][fC][mU][fG][mA][mG][fU] | |
| C22 | | | [mU][mU][mC][fA][mU][fC][mC][mA][fC][mCs] | |
| | | | [mGs][mG] | |
| GalXC- | Unmodified | | AGGACGACUUUGAUUUCAAAGCAGCCG | 9 |
| STAT3- | 36 mer | | AAAGGCUGC | |
| 838 | | | | |
| GalXC- | Unmodified | | UUUGAAAUCAAAGUCGUCCUGG | 10 |
| STAT3- | 22 mer | | | |
| 838 | | | | |
| GalXC- | Modified | | [mAs][mG][mG][mA][mC][mG][mA][fC][fU] | 11 |
| STAT3- | 36 mer | | [fU][fU][mG][mA][mU][mU][mU][mC][mA][mA] | |
| 838 | | | [mA][mG][mC][mA][mG][mC][mC][mG][ademA- | |
| | | | GalNAc][ademA-GalNAc][ademA- | |
| | | | GalNAc][mG][mG][mC][mU][mG][mC] | |
| GalXC- | Modified | | [MePhosphonate-4O- | 12 |
| STAT3- | 22 mer | | mUs][fUs][fU][fG][fA][mA][fA][mU][mC][fA] | |
| 838 | | | [mA][mA][mG][fU][mC][mG][mU][mC][mC] | |
| | | | [mUs][mGs][mG] | |
| GalXC- | Unmodified | | UCAAAUUUCCUGAGUUGAAAGCAGCCG | 13 |
| STAT3- | 36 mer | | AAAGGCUGC | |
| 1390 | | | | |
| GalXC- | Unmodified | | UUUCAACUCAG | 14 |
| STAT3- | 22 mer | | GAAUUUGAGG | |
| 1390 | | | | |
| GalXC- | Modified | | [mUs][mC][mA][mA][mA][mU][mU][fU][fC] | 15 |
| STAT3- | 36 mer | | [fC][fU][mG][mA][mG][mU][mU][mG][mA][mA] | |
| 1390 | | | [mA][mG][mC][mA][mG][mC][mC][mG][ademA- | |
| | | | GalNAc][ademA-GalNAc][ademA- | |
| | | | GalNAc][mG\|mG\|mC\|mU][mG\|mC] | |
| GalXC- | Modified | | [MePhosphonate-4O- | 16 |
| STAT3- | 22 mer | | mUs][fUs][fU][fC][fA][mA][fC][mU][mC][fA] | |
| 1390 | | | [mG][mG][mA][fA][mA][mU][mU][mU][mG] | |
| | | | [mAs][mGs][mG] | |
| GalXC- | Unmodified | | AUUUCCUGAGUUGAAUUAUAGCAGCCG | 17 |
| STAT3- | 36 mer | | AAAGGCUGC | |
| 1394 | | | | |
| GalXC- | Unmodified | | UAUAAUUCAACUCAGGAAAUGG | 18 |
| STAT3- | 22 mer | | | |
| 1394 | | | | |
| GalXC- | Modified | | [mAs][mU][mU][mU][mC][mC][mU][fG][fA] | 19 |
| STAT3- | 36 mer | | [fG][fU][mU][mG][mA][mA][mU][mU][mA] | |
| 1394 | | | [mU][mA][mG][mC][mA][mG][mC][mC][mG][ademA- | |
| | | | GalNAc][ademA-GalNAc][ademA- | |
| | | | GalNac][mG][mG][mC][mU][mG][mC] | |
| GalXC- | Modified | | [MePhosphonate-4O- | 20 |
| STAT3- | 22 mer | | mUs][fAs][fU][fA][fA][mU][fU][mC][mA][fA] | |
| 1394 | | | [mC][mU][mC][fA][mG][mG][mA][mA][mA] | |
| | | | [mUs][mGs][mG] | |
| GalXC- | Unmodified | | CCUGAGUUGAAUUAUCAGCAGCAGCCG | 21 |
| STAT3- | 36 mer | | AAAGGCUGC | |
| 1398 | | | | |
| GalXC- | Unmodified | | UGCUGAUAAUUCAACUCAGGGG | 22 |
| STAT3- | 22 mer | | | |
| 1398 | | | | |
| GalXC- | Modified | | [mCs][mC][mU][mG][mA][mG][mu][fU][fG][fA] | |
| STAT3- | 36 mer | | [fA][mU][mU][mA][mU][mC][mA][mG][mC] | 23 |
| 1398 | | | [mA][mG][mC][mA][mG][mC][mC][mG][ademA- | |
| | | | GalNAc][ademA-GalNAc][ademA- | |
| | | | GalNac][mG][mG][mC][mU][mG][mC] | |
| GalXC- | Modified | | [MePhosphonate-4O- | 24 |
| STAT3- | 22 mer | | mUs][fGs][fC][fU][fG][mA][fU][mA][mA][fU] | |
| 1398 | | | [mU][mC][mA][fA][mC][mU][mC][mA][mG] | |
| | | | [mGs][mGs][mG] | |
| GalXC- | Unmodified | | CUGAGUUGAAUUAUCAGCUAGCAGCCG | 25 |
| STAT3- | 36 mer | | AAAGGCUGC | |
| 1399 | | | | |
| GalXC- | Unmodified | | UAGCUGAUAAUUCAACUCAGGG | 26 |
| STAT3- | 22 mer | | | |
| 1399 | | | | |
| GalXC- | Modified | | [mCs][mU][mG][mA][mG][mU][mU][fG][fA] | 27 |
| STAT3- | 36 mer | | [fA][fU][mU][mA][mU][mC][mA][mG][mC][mU] | |
| 1399 | | | [mA][mG][mC][mA][mG][mC][mC][mG][ademA- | |
| | | | GalNAc][ademA-GalNAc][ademA- | |
| | | | GalNAc][mG][mG][mC][mU][mG][mC] | |
| GalXC- | Modified | | [MePhosphonate-4O- | 28 |
| STAT3- | 22 mer | | mUs][fAs][fG][fC][fU][mG][fA][mU][mA][fA] | |
| 1399 | | | [mU][mU][mC][fA][mA][mC][mU][mC][mA] | |
| | | | [mGs][mGs][mG] | |
| GalXC- | Unmodified | | UGAGUUGAAUUAUCAGCUUAGCAGCCG | 29 |
| STAT3- | 36 mer | | AAAGGCUGC | |
| 1400 | | | | |
| GalXC- | Unmodified | | UAAGCUGAUAAUUCAACUCAGG | 30 |
| STAT3- | 22 mer | | | |
| 1400 | | | | |
| GalXC- | Modified | | [mUs][mG][mA][mG][mU][mU][mG][fA][fA][fU] | 31 |
| STAT3- | 36 mer | | [fU][mA][mU][mC][mA][mG][mC][mU][mU] | |
| 1400 | | | [mA][mG][mC][mA][mG][mC][mC][mG][ademA- | |
| | | | GalNAc][ademA-GalNAc][ademA- | |
| | | | GalNac][mG][mG][mC][mU][mG][mC] | |
| GalXC- | Modified | | [MePhosphonate-4O- | 32 |
| STAT3- | 22 mer | | mUs][fAs][fA][fG][fC][mU][fG][mA][mU][fA] | |
| 1400 | | | [mA][mU][mU][fC][mA][mA][mC][mU][mC] | |
| | | | [mAs][mGs][mG] | |
| GalXC- | Unmodified | | GAGUUGAAUUAUCAGCUUAAGCAGCCG | 33 |
| STAT3- | 36 mer | | AAAGGCUGC | |
| 1401 | | | | |
| GalXC- | Unmodified | | UUAAGCUGAUAAUUCAACUCGG | 34 |
| STAT3- | 22 mer | | | |
| 1401 | | | | |
| GalXC- | Modified | | [mGs][mA][mG][mU][mU][mG][mA][fA][fU] | 35 |
| STAT3- | 36 mer | | [fU][fA][mU][mC][mA][mG][mC][mU][mU][mA] | |
| 1401 | | | mA][mG][mC][mA][mG][mC][mC][mG][ademA- | |
| | | | GalNAc][ademA-GalNAc][ademA- | |
| | | | GalNAc][mG][mG][mC\|mU][mG\|mC] | |
| GalXC- | Modified | | [MePhosphonate-4O- | 36 |
| STAT3- | 22 mer | | mUs][fUs][fA][fA][fG][mC][fU][mG][mA][fU] | |
| 1401 | | | [mA][mA][mU][fU][mC][mA][mA][mC][mU][mCs] | |
| | | | [mGs][mG] | |
| GalXC- | Unmodified | | AGUUGAAUUAUCAGCUUAAAGCAGCCG | 37 |
| STAT3- | 36 mer | | AAAGGCUGC | |
| 1402 | | | | |
| GalXC- | Unmodified | | UUUAAGCUGAUAAUUCAACUGG | 38 |
| STAT3- | 22 mer | | | |
| 1402 | | | | |
| GalXC- | Modified | | [mAs][mG][mU][mU][mG][mA][mA][fU][fU][fA] | 39 |
| STAT3- | 36 mer | | [fU][mC][mA][mG][mC][mU][mU][mA][mA] | |
| 1402 | | | [mA][mG][mC][mA][mG][mC][mC][mG][ademA- | |
| | | | GalNAc][ademA-GalNAc][ademA- | |
| | | | GalNAc][mG][mG][mC\|mU][mG\|mC] | |
| GalXC- | Modified | | [MePhosphonate-4O- | 40 |
| STAT3- | 22 mer | | mUs][fUs][fU][fA][fA][mG][fC][mU][mG][fA] | |
| 1402 | | | [mU][mA][mA][fU][mU][mC][mA][mA][mC] | |
| | | | [mUs][mGs][mG] | |
| GalXC- | Unmodified | | CAAUCCUGUGGUAUAACAUAGCAGCCG | 41 |
| STAT3- | 36 mer | | AAAGGCUGC | |
| 1759 | | | | |
| GalXC- | Unmodified | | UAUGUUAUACCACAGGAUUGGG | 42 |
| STAT3- | 22 mer | | | |
| 1759 | | | | |
| GalXC- | Modified | | [mCs][mA][mA][mU][mC][mC][mU][fG][fU] | 43 |
| STAT3- | 36 mer | | [fG][fG][mU][mA][mU][mA][mA][mC][mA][mU] | |
| 1759 | | | [mA][mG][mC][mA][mG][mC][mC][mG][ademA- | |
| | | | GalNAc][ademA-GalNAc][ademA- | |
| | | | GalNAc][mG][mG][mC][mU][mG][mC] | |
| GalXC- | Modified | | [MePhosphonate-4O- | 44 |
| STAT3- | 22 mer | | mUs][fAs][fU][fG][fU][mU][fA][mU][mA][fC] | |
| 1759 | | | [mC][mA][mC][fA][mG][mG][mA][mU][mU][mGs] | |
| | | | [mGs][mG] | |
| GalXC- | Unmodified | | ACAAUAUCAUCGACCUUGUAGCAGCCG | 45 |
| STAT3- | 36 mer | | AAAGGCUGC | |
| 2029 | | | | |
| GalXC- | Unmodified | | UACAAGGUCGAUGAUAUUGUGG | 46 |
| STAT3- | 22 mer | | | |
| 2029 | | | | |
| GalXC- | Modified | | [mAs][mC][mA][mA][mU][mA][mU][fC][A][fU] | 47 |
| STAT3- | 36 mer | | [fC][mG][mA][mC][mC][mU][mU][mG][mU] | |
| 2029 | | | [mA][mG][mC][mA][mG][mC][mC][mG][ademA- | |
| | | | GalNAc][ademA-GalNAc][ademA- | |
| | | | GalNAc][mG][G][mC][mU][mG][mC] | |
| GalXC- | Modified | | [MePhosphonate-4O- | 48 |
| STAT3- | 22 mer | | mUs][fAs][fC][fA][fA][mG][fG][mU][mC][fG] | |
| 2029 | | | [mA][mU][mG][fA][mU][mA][mU][mU][mG] | |
| | | | [mUs][mGs][mG] | |
| GalXC- | Unmodified | | AUCAUCGACCUUGUGAAAAAGCAGCCG | 49 |
| STAT3- | 36 mer | | AAAGGCUGC | |
| 2034 | | | | |
| GalXC- | Unmodified | | UUUUUCACAAGGUCGAUGAUGG | 50 |
| STAT3- | 22 mer | | | |
| 2034 | | | | |
| GalXC- | Modified | | [mAs][mU][mC][mA][mU][mC][mG][fA][fC][fC] | 51 |
| STAT3- | 36 mer | | [fU][mU][mG][mU][mG][mA][mA][mA][mA] | |
| 2034 | | | [mA][mG][mC][mA][mG][mC][mC][mG][ademA- | |
| | | | GalNAc][ademA-GalNAc][ademA- | |
| | | | GalNac][mG][mG][mC][mU][mg][mC] | |
| GalXC- | Modified | | [MePhosphonate-4O- | 52 |
| STAT3- | 22 mer | | mUs][fUs][fU][fU][fU][mC][fA][mC][mA][fA] | |
| 2034 | | | [mG][mG][mU][fC][mG][mA][mU][mG][mA] | |
| | | | [mUs][mGs][mG] | |
| GalXC- | Unmodified | | CUGAAGACCAAGUUCAUCUAGCAGCCG | 53 |
| STAT3- | 36 mer | | AAAGGCUGC | |
| 2448 | | | | |
| GalXC- | Unmodified | | UAGAUGAACUU | 54 |
| STAT3- | 22 mer | | GGUCUUCAGGG | |
| 2448 | | | | |
| GalXC- | Modified | | [mCs][mU][mG][mA][mA][mG][mA][fC][fC][fA] | 55 |
| STAT3- | 36 mer | | [fA][mG][mU][mU][mC][mA][mU][mC][mU] | |
| 2448 | | | [mA][mG][mC][mA][mG][mC][mC][mG][ademA- | |
| | | | GalNAc][ademA-GalNAc][ademA- | |
| | | | GalNAc][mG][mG][mC][mU][mG][mC] | |
| GalXC- | Modified | | [MePhosphonate-4O- | 56 |
| STAT3- | 22 mer | | mUs][fAs][fG][fA][fU][mG][fA][mA][mC][fU] | |
| 2448 | | | [mU][mG][mG][fU][mC][mU][mU][mC][mA][mGs] | |
| | | | [mGs][mG] | |
| GalXC- | Unmodified | | AUUCAUUGAUGCAGUUUGGAGCAGCCG | 57 |
| STAT3- | 36 mer | | AAAGGCUGC | |
| 2527 | | | | |
| GalXC- | Unmodified | | UCCAAACUGCAUCAAUGAAUGG | 58 |
| STAT3- | 22 mer | | | |
| 2527 | | | | |
| GalXC- | Modified | | [mAs][mU][mU][mC][mA][mU][mU][fG][fA][fU] | 59 |
| STAT3- | 36 mer | | [fG][mC][mA][mG][mU][mU][mU][mG][mG] | |
| 2527 | | | [mA][mG][mC][mA][mG][mC][mC][mG][ademA- | |
| | | | GalNAc][ademA-GalNAc][ademA- | |
| | | | GalNAc][mG][mG][mC\|mU][mG][mC] | |
| GalXC- | Modified | | [MePhosphonate-4O- | 60 |
| STAT3- | 22 mer | | mUs][fCs][fC][fA][fA][mA][fC][mU][mG][fC] | |
| 2527 | | | [mA][mU][mC][fA][mA][mU][mG][mA][mA] | |
| | | | [mUs][mGs][mG] | |
| GalXC- | Unmodified | | CCCAUCAAUGUUCUUUAGUAGCAGCCG | 61 |
| STAT3- | 36 mer | | AAAGGCUGC | |
| 4107 | | | | |
| GalXC- | Unmodified | | UACUAAAGAACAUUGAUGGGGG | 62 |
| STAT3- | 22 mer | | | |
| 4107 | | | | |
| GalXC- | Modified | | [mCs][mC][mC][mA][mU][mC][mA][fA][fU][fG] | 63 |
| STAT3- | 36 mer | | [fU][mU][mC][mU][mU][mU][mA][mG][mU] | |
| 4107 | | | [mA][mG][mC][mA][mG][mC][mC][mG][ademA- | |
| | | | GalNAc][ademA-GalNAc][ademA- | |
| | | | GalNAc][mG][mG][mC][mU][mG][mC] | |
| GalXC- | Modified | | [MePhosphonate-4O- | 64 |
| STAT3- | 22 mer | | mUs][fAs][fC][fU][fA][mA][fA][mG][mA][fA] | |
| 4107 | | | [mC][mA][mU][fU][mG][mA][mU][mG][mG] | |
| | | | [mGs][mGs][mG] | |
| GalXC- | Unmodified | | AUCAAUGUUCUUUAGUUAUAGCAGCCG | 65 |
| STAT3- | 36 mer | | AAAGGCUGC | |
| 4110 | | | | |
| GalXC- | Unmodified | | UAUAACUAAAGAACAUUGAUGG | 66 |
| STAT3- | 22 mer | | | |
| 4110 | | | | |
| GalXC- | Modified | | [mAs][mU][mC][mA][mA][mU][mG][fU][fU][fC] | 67 |
| STAT3- | 36 mer | | [fU][mU][mU][mA][mG][mU][mU][mA][mU] | |
| 4110 | | | [mA][mG][mC][mA][mG][mC][mC][mG][ademA- | |
| | | | GalNAc][ademA-GalNAc][ademA- | |
| | | | GalNAc][mG][mG][mC][mU][mG][mC] | |
| GalXC- | Modified | | [MePhosphonate-4O- | 68 |
| STAT3- | 22 mer | | mUs][fAs][fU][fA][fA][mC][fU][mA][mA][fA] | |
| 4110 | | | [mG][mA][mA][fC][mA][mU][mU][mG][mA] | |
| | | | [mUs][mGs][mG] | |
| GalXC- | Unmodified | | AGUUAUACAAUAAGCUGAAAGCAGCCG | 69 |
| STAT3- | 36 mer | | AAAGGCUGC | |
| 4123 | | | | |
| GalXC- | Unmodified | | UUUCAGCUUAUUGUAUAACUGG | 70 |
| STAT3- | 22 mer | | | |
| 4123 | | | | |
| GalXC- | Modified | | [mAs][mG][mU][mU][mA][mU][mA][fC][fA][fA] | 71 |
| STAT3- | 36 mer | | [fU][mA][mA][mG][mC][mU][mG][mA][mA] | |
| 4123 | | | [mA][mG][mC][mA][mG][mC][mC][mG][ademA- | |
| | | | GalNAc][ademA-GalNAc][ademA- | |
| | | | GalNAc][mG][mG][mC][mU][mG][mC] | |
| GalXC- | Modified | | [MePhosphonate-4O- | 72 |
| STAT3- | 22 mer | | mUs][fUs][fU][fC][fA][mG][fC][mU][mU][fA] | |
| 4123 | | | [mU][mU][mG][fU][mA][mU][mA][mA][mC] | |
| | | | [mUs][mGs][mG] | |
| GalXC- | Unmodified | | AGUGUAAAAAUUUAUAUUAAGCAGCCG | 73 |
| STAT3- | 36 mer | | AAAGGCUGC | |
| 4435 | | | | |
| GalXC- | Unmodified | | UUAAUAUAAAUUUUUACACUGG | 74 |
| STAT3- | 22 mer | | | |
| 4435 | | | | |
| GalXC- | Modified | | [mAs][mG][mU][mG][mU][mA][mA][fA][fA][fA] | 75 |
| STAT3- | 36 mer | | [fU][mU][mU][mA][mU][mA][mU][mU][mA] | |
| 4435 | | | [mA][mG][mC][mA][mG][mC][mC][mG][ademA- | |
| | | | GalNAc][ademA-GalNAc][ademA- | |
| | | | GalNAc][mG][mG][mC][mU][mG][mC] | |
| GalXC- | Modified | | [MePhosphonate-4O- | 76 |
| STAT3- | 22 mer | | mUs][fUs][fA][fA][fU][mA][fU][mA][mA][fA] | |
| 4435 | | | [mU][mU][mU][fU][mU][mA][mC][mA][mC] | |
| | | | [mUs][mGs][mG] | |
| GalXC- | Unmodified | | UUGUUUGUUUUUGUAUAUUAGCAGCCG | 77 |
| STAT3- | 36 mer | | AAAGGCUGC | |
| 4474 | | | | |
| GalXC- | Unmodified | | UUAAUAUAAAUUUUUACACUGG | 78 |
| STAT3- | 22 mer | | | |
| 4474 | | | | |
| GalXC- | Modified | | [mUs][mU][mG][mU][mU][mU][mG][fU][fU][fU] | 79 |
| STAT3- | 36 mer | | [fU][mU][mG][mU][mA][mU][mA][mU][mU] | |
| 4474 | | | [mA][mG][mC][mA][mG][mC][mC][mG][ademA- | |
| | | | GalNAc][ademA-GalNAc][ademA- | |
| | | | GalNac][mG][mG][mC][mU][mG][mC] | |
| GalXC- | Modified | | [MePhosphonate-4O- | 80 |
| STAT3- | 22 mer | | mUs][fAs][fA][fU][fA][mU][fA][mC][mA][fA] | |
| 4474 | | | [mA][mA][mA][fC][mA][mA][mA][mC][mA][mAs] | |
| | | | [mGs][mG] | |
| GalXC- | Modified | | [mAs][mU][mC][mA][mA][mU][mG][fU][fU][fC] | 81 |
| STAT3- | 36 mer | | [fU][mU][mU][mA][mG][mU][mU][mA][mU] | |
| 4110- | | | [mA][mG][mC][mA][mG][mC][mC][mG][ademA- | |
| C18 | | | C18][mA][mA]\|mG\|mG][mC][ mU][mG\|[mC] | |
| GalXC- | Modified | | [MePhosphonate-4O- | 82 |
| STAT3- | 22 mer | | mUs][fAs][fU][fA][fA][mC][fU][mA][mA][fA] | |
| 4110- | | | [mG][mA][mA][fC][mA][mU][mU][mG][mA] | |
| C18 | | | [mUs][mGs][mG] | |
| GalXC- | Modified | | [mAs][mG][mU][mU][mA][mU][mA][fC][fA][fA] | 83 |
| STAT3- | 36 mer | | [fU][mA][mA][mG][mC][mU][mG][mA][mA] | |
| 4123- | | | [mA][mG\|mC][mA][mG][mC][mC][mG][ademA- | |
| C18 | | | C18][mA][mA][mG][mG][mC][mU][mG][mC] | |
| GalXC- | Modified | | [MePhosphonate-4O- | 84 |
| STAT3- | 22 mer | | mUs][fUs][fU][fC][fA][mG][fC][mU][mU][fA] | |
| 4123- | | | [mU][mU][mG][fU][mA][mU][mA][mA][mC] | |
| C18 | | | [mUs][mGs][mG] | |
| | STAT3 | | GTCGCAGCCGAGGGAACAAGCCCCAACC | 85 |
| | Human (Hs) | | GGATCCTGGACAGGCACCCCGGCTTGGC | |
| | NM_001369512.1 | | GCTGTCTCTCCCCCTCGGCTCGGAGAGGC | |
| | (Genbank | | CCTTCGGCCTGAGGGAGCCTCGCCGCCC | |
| | RefSeq #) | | GTCCCCGGCACACGCGCAGCCCCGGCCT | |
| | | | CTCGGCCTCTGCCGGAGAAACAGGATGG | |
| | | | CCCAATGGAATCAGCTACAGCAGCTTGA | |
| | | | CACACGGTACCTGGAGCAGCTCCATCAG | |
| | | | CTCTACAGTGACAGCTTCCCAATGGAGCT | |
| | | | GCGGCAGTTTCTGGCCCCTTGGATTGAGA | |
| | | | GTCAAGATTGGGCATATGCGGCCAGCAA | |
| | | | AGAATCACATGCCACTTTGGTGTTTCATA | |
| | | | ATCTCCTGGGAGAGATTGACCAGCAGTA | |
| | | | TAGCCGCTTCCTGCAAGAGTCGAATGTTC | |
| | | | TCTATCAGCACAATCTACGAAGAATCAA | |
| | | | GCAGTTTCTTCAGAGCAGGTATCTTGAGA | |
| | | | AGCCAATGGAGATTGCCCGGATTGTGGC | |
| | | | CCGGTGCCTGTGGGAAGAATCACGCCTT | |
| | | | CTACAGACTGCAGCCACTGCGGCCCAGC | |
| | | | AAGGGGGCCAGGCCAACCACCCCACAGC | |
| | | | AGCCGTGGTGACGGAGAAGCAGCAGATG | |
| | | | CTGGAGCAGCACCTTCAGGATGTCCGGA | |
| | | | AGAGAGTGCAGGATCTAGAACAGAAAAT | |
| | | | GAAAGTGGTAGAGAATCTCCAGGATGAC | |
| | | | TTTGATTTCAACTATAAAACCCTCAAGAG | |
| | | | TCAAGGAGACATGCAAGATCTGAATGGA | |
| | | | AACAACCAGTCAGTGACCAGGCAGAAGA | |
| | | | TGCAGCAGCTGGAACAGATGCTCACTGC | |
| | | | GCTGGACCAGATGCGGAGAAGCATCGTG | |
| | | | AGTGAGCTGGCGGGGCTTTTGTCAGCGA | |
| | | | TGGAGTACGTGCAGAAAACTCTCACGGA | |
| | | | CGAGGAGCTGGCTGACTGGAAGAGGCGG | |
| | | | CAACAGATTGCCTGCATTGGAGGCCCGC | |
| | | | CCAACATCTGCCTAGATCGGCTAGAAAA | |
| | | | CTGGATAACGTCATTAGCAGAATCTCAA | |
| | | | CTTCAGACCCGTCAACAAATTAAGAAAC | |
| | | | TGGAGGAGTTGCAGCAAAAAGTTTCCTA | |
| | | | CAAAGGGGACCCCATTGTACAGCACCGG | |
| | | | CCGATGCTGGAGGAGAGAATCGTGGAGC | |
| | | | TGTTTAGAAACTTAATGAAAAGTGCCTTT | |
| | | | GTGGTGGAGCGGCAGCCCTGCATGCCCA | |
| | | | TGCATCCTGACCGGCCCCTCGTCATCAAG | |
| | | | ACCGGCGTCCAGTTCACTACTAAAGTCA | |
| | | | GGTTGCTGGTCAAATTCCCTGAGTTGAAT | |
| | | | TATCAGCTTAAAATTAAAGTGTGCATTGA | |
| | | | CAAAGACTCTGGGGACGTTGCAGCTCTC | |
| | | | AGAGGATCCCGGAAATTTAACATTCTGG | |
| | | | GCACAAACACAAAAGTGATGAACATGGA | |
| | | | AGAATCCAACAACGGCAGCCTCTCTGCA | |
| | | | GAATTCAAACACTTGACCCTGAGGGAGC | |
| | | | AGAGATGTGGGAATGGGGGCCGAGCCAA | |
| | | | TTGTGATGCTTCCCTGATTGTGACTGAGG | |
| | | | AGCTGCACCTGATCACCTTTGAGACCGA | |
| | | | GGTGTATCACCAAGGCCTCAAGATTGAC | |
| | | | CTAGAGACCCACTCCT | |
| | | | TGCCAGTTGTGGTGATCTCCAACATCTGT | |
| | | | CAGATGCCAAATGCCTGGGCGTCCATCCT | |
| | | | GTGGTACAACATGCTGACCAACAATCCC | |
| | | | AAGAATGTAAACTTTTTTACCAAGCCCCC | |
| | | | AATTGGAACCTGGGATCAAGTGGCCGAG | |
| | | | GTCCTGAGCTGGCAGTTCTCCTCCACCAC | |
| | | | CAAGCGAGGACTGAGCATCGAGCAGCTG | |
| | | | ACTACACTGGCAGAGAAACTCTTGGGAC | |
| | | | CTGGTGTGAATTATTCAGGGTGTCAGATC | |
| | | | ACATGGGCTAAATTTTGCAAAGAAAACA | |
| | | | TGGCTGGCAAGGGCTTCTCCTTCTGGGTC | |
| | | | TGGCTGGACAATATCATTGACCTTGTGAA | |
| | | | AAAGTACATCCTGGCCCTTTGGAACGAA | |
| | | | GGGTACATCATGGGCTTTATCAGTAAGG | |
| | | | AGCGGGAGCGGGCCATCTTGAGCACTAA | |
| | | | GCCTCCAGGCACCTTCCTGCTAAGATTCA | |
| | | | GTGAAAGCAGCAAAGAAGGAGGCGTCAC | |
| | | | TTTCACTTGGGTGGAGAAGGACATCAGC | |
| | | | GGTAAGACCCAGATCCAGTCCGTGGAAC | |
| | | | CATACACAAAGCAGCAGCTGAACAACAT | |
| | | | GTCATTTGCTGAAATCATCATGGGCTATA | |
| | | | AGATCATGGATGCTACCAATATCCTGGTG | |
| | | | TCTCCACTGGTCTATCTCTATCCTGACAT | |
| | | | TCCCAAGGAGGAGGCATTCGGAAAGTAT | |
| | | | TGTCGGCCAGAGAGCCAGGAGCATCCTG | |
| | | | AAGCTGACCCAGGTAGCGCTGCCCCATA | |
| | | | CCTGAAGACCAAGTTTATCTGTGTGACAC | |
| | | | CA | |
| | | | ACGACCTGCAGCAATACCATTGACCTGC | |
| | | | CGATGTCCCCCCGCACTTTAGATTCATTG | |
| | | | ATGCAGTTTGGAAATAATGGTGAAGGTG | |
| | | | CTGAACCCTCAGCAGGAGGGCAGTTTGA | |
| | | | GTCCCTCACCTTTGACATGGAGTTGACCT | |
| | | | CGGAGTGCGCTACCTCCCCCATGTGAGG | |
| | | | AGCTGAGAACGGAAGCTGCAGAAAGATA | |
| | | | CGACTGAGGCGCCTACCTGCATTCTGCCA | |
| | | | CCCCTCACACAGCCAAACCCCAGATCAT | |
| | | | CTGAAACTACTAACTTTGTGGTTCCAGAT | |
| | | | TTTTTTTAATCTCCTACTTCTGCTATCTTT | |
| | | | GAGCAATCTGGGCACTTTTAAAAATAGA | |
| | | | GAAATGAGTGAATGTGGGTGATCTGCTTT | |
| | | | TATCTAAATGCAAATAAGGATGTGTTCTC | |
| | | | TGAGACCCATGATCAGGGGATGTGGCGG | |
| | | | GGGGTGGCTAGAGGGAGAAAAAGGAAA | |
| | | | TGTCTTGTGTTGTTTTGTTCCCCTGCCCTC | |
| | | | CTTTCTCAGCAGCTTTTTGTTATTGTTGTT | |
| | | | GTTGTTCTTAGACAAGTGCCTCCTGGTGC | |
| | | | CTGCGGCATCCTTCTGCCTGTTTCTGTAA | |
| | | | GCAAATGCCACAGGCCACCTATAGCTAC | |
| | | | ATACTCCTGGCATTGCACTTTTTAACCTT | |
| | | | GCTGACATCCAAATAGAAGATAGGACTA | |
| | | | TCTAAGCCCTAGGTTTCTTTTTAAATTAA | |
| | | | GAAATAATAACAATTAAAGGGCAAAAAA | |
| | | | CACTGTATCAGCATAGCCTTTCTGTATTT | |
| | | | AAGAAACTTAAGCAGCCGGGCATGGTGG | |
| | | | CTCACGCCTGTAATCCCAGCACTTTGGGA | |
| | | | GGCCGAGGCGGATCATAAGGTCAGGAGA | |
| | | | TCAAGACCATCCTGGCTAACACGGTGAA | |
| | | | ACCCCGTCTCTACTAAAAGTACAAAAAA | |
| | | | TTAGCTGGGTGTGGTGGTGGGCGCC | |
| | | | TGTAGTCCCAGCTACTCGGGAGGCTGAG | |
| | | | GCAGGAGAATCGCTTGAACCTGAGAGGC | |
| | | | GGAGGTTGCAGTGAGCCAAAATTGCACC | |
| | | | ACTGCACACTGCACTCCATCCTGGGCGAC | |
| | | | AGTCTGAGACTCTGTCTCAAAAAAAAAA | |
| | | | AAAAAAAAAAGAAACTTCAGTTAACAGC | |
| | | | CTCCTTGGTGCTTTAAGCATTCAGCTTCC | |
| | | | TTCAGGCTGGTAATTTATATAATCCCTGA | |
| | | | AACGGGCTTCAGGTCAAACCCTTAAGAC | |
| | | | ATCTGAAGCTGCAACCTGGCCTTTGGTGT | |
| | | | TGAAATAGGAAGGTTTAAGGAGAATCTA | |
| | | | AGCATTTTAGACTTTTTTTTATAAATAGA | |
| | | | CTTATTTTCCTTTGTAATGTATTGGCCTTT | |
| | | | TAGTGAGTAAGGCTGGGCAGAGGGTGCT | |
| | | | TACAACCTTGACTCCCTTTCTCCCTGGAC | |
| | | | TTGATCTGCTGTTTCAGAGGCTAGGTTGT | |
| | | | TTCTGTGGGTGCCTTATCAGGGCTGGGAT | |
| | | | ACTTCTGATTCTGGCTTCCTTCCTGCCCC | |
| | | | ACCCTCCCGACCCCAGTCCCCCTGATCCT | |
| | | | GCTAGAGGCATGTCTCCTTGCGTGTCTAA | |
| | | | AGGTCCCTCATCCTGTTTGTTTTAGGAAT | |
| | | | CCTGGTCTCAGGACCTCATGGAAGAAGA | |
| | | | GGGGGAGAGAGTTACAGGTTGGACATGA | |
| | | | TGCACACTATGGGGCCCCAGCGACGTGT | |
| | | | CTGGTTGAGCTCAGGGAATATGGTTCTTA | |
| | | | GCCAGTTTCTTGGTGATATCCAGTGGCAC | |
| | | | TTGTAATGGCGTCTTCATTCAGTTCA | |
| | | | TGCAGGGCAAAGGCTTACTGATAAACTT | |
| | | | GAGTCTGCCCTCGTATGAGGGTGTATACC | |
| | | | TGGCCTCCCTCTGAGGCTGGTGACTCCTC | |
| | | | CCTGCTGGGGCCCCACAGGTGAGGCAGA | |
| | | | ACAGCTAGAGGGCCTCCCCGCCTGCCCG | |
| | | | CCTTGGCTGGCTAGCTCGCCTCTCCTGTG | |
| | | | CGTATGGGAACACCTAGCACGTGCTGGA | |
| | | | TGGGCTGCCTCTGACTCAGAGGCATGGC | |
| | | | CGGATTTGGCAACTCAAAACCACCTTGCC | |
| | | | TCAGCTGATCAGAGTTTCTGTGGAATTCT | |
| | | | GTTTGTTAAATCAAATTAGCTGGTCTCTG | |
| | | | AATTAAGGGGGAGACGACCTTCTCTAAG | |
| | | | ATGAACAGGGTTCGCCCCAGTCCTCCTGC | |
| | | | CTGGAGACAGTTGATGTGTCATGCAGAG | |
| | | | CTCTTACTTCTCCAGCAACACTCTTCAGT | |
| | | | ACATAATAAGCTTAACTGATAAACAGAA | |
| | | | TATTTAGAAAGGTGAGACTTGGGCTTACC | |
| | | | ATTGGGTTTAAATCATAGGGACCTAGGG | |
| | | | CGAGGGTTCAGGGCTTCTCTGGAGCAGA | |
| | | | TATTGTCAAGTTCATGGCCTTAGGTAGCA | |
| | | | TGTATCTGGTCTTAACTCTGATTGTAGCA | |
| | | | AAAGTTCTGAGAGGAGCTGAGCCCTGTT | |
| | | | GTGGCCCATTAAAGAACAGGGTCCTCAG | |
| | | | GCCCTGCCCGCTTCCTGTCCACTGCCCCC | |
| | | | TCCCCATCCCCAGCCCAGCCGAGGGAAT | |
| | | | CCCGTGGGTTGCTTACCTACCTATAAGGT | |
| | | | GGTTTATAAGCTGCTGTCCTGGCCACTGC | |
| | | | ATTCAAATTCCAATGTGTACTTCATAGTG | |
| | | | TAAAAATTTATATTATTGTGAGGTTTTTT | |
| | | | GTCTTTTTTTTTTTTTTTTTTTTTTGGTATA | |
| | | | TTGCTGTATCTACTTTAACTTCCAGAAAT | |
| | | | AAACGTTATATAGGAACCGTC | |
| | Stem Loop | | GCAGCCGAAAGGCUGC | 86 |
| GalXC- | Modified | | [mAs][mU][mC][mA][mA][mU][mG][fU][fU][fC] | 87 |
| STAT3- | 36 mer | | [fU][mU][mU][mA][mG][mU][mU][mA][mU] | |
| 2029 | | | [mA][mG][mC][mA][mG][mC][mC][mG][ademA- | |
| | | | C18][mA][mA\|mG\|mG][mC\|mU][mG\|mC] | |
| STAT3- | Modified | | [mAs][mG][mU][mU][mA][mU][mA][fC][fA][fA] | 88 |
| 4123- | 36 mer | | [fU][mA][mA][mG][mC][mU][mG][mA][mA] | |
| C18 | | | [mA][mG][mC][mA][mG][mC][mC][mG][ademA- | |
| | | | C18][mA][mA][mG][mG][mC][mU][mG][mC] | |
| STAT3- | Sense | | CACUUUGGUGUUUCAUAAU | 89 |
| 370 | 19 mer | | | |
| STAT3- | Sense | | CUUUGGUGUUUCAUAAUCU | 90 |
| 372 | 19 mer | | | |
| STAT3- | Sense | | CCUGCAAGAGUCGAAUGUU | 91 |
| 424 | 19 mer | | | |
| STAT3- | Sense | | CUGCAAGAGUCGAAUGUUC | 92 |
| 425 | 19 mer | | | |
| STAT3- | Sense | | UGCAAGAGUCGAAUGUUCU | 93 |
| 426 | 19 mer | | | |
| STAT3- | Sense | | AAGAGUCGAAUGUUCUCUA | 94 |
| 429 | 19 mer | | | |
| STAT3- | Sense | | AGAGUCGAAUGUUCUCUAU | 95 |
| 430 | 19 mer | | | |
| STAT3- | Sense | | AGUCGAAUGUUCUCUAUCA | 96 |
| 432 | 19 mer | | | |
| STAT3- | Sense | | GUCGAAUGUUCUCUAUCAG | 97 |
| 433 | 19 mer | | | |
| STAT3- | Sense | | ACGAAGAAUCAAGCAGUUU | 98 |
| 460 | 19 mer | | | |
| STAT3- | Sense | | CGAAGAAUCAAGCAGUUUC | 99 |
| 461 | 19 mer | | | |
| STAT3- | Sense | | GAAGAAUCAAGCAGUUUCU | 100 |
| 462 | 19 mer | | | |
| STAT3- | Sense | | AUCUUGAGAAGCCAAUGGA | 101 |
| 492 | 19 mer | | | |
| STAT3- | Sense | | AGGAUCUAGAACAGAAAAU | 102 |
| 678 | 19 mer | | | |
| STAT3- | Sense | | AUCUAGAACAGAAAAUGAA | 103 |
| 681 | 19 mer | | | |
| STAT3- | Sense | | CCAGGAUGACUUUGAUUUC | 104 |
| 715 | 19 mer | | | |
| STAT3- | Sense | | CAGGAUGACUUUGAUUUCA | 105 |
| 716 | 19 mer | | | |
| STAT3- | Sense | | AGGAUGACUUUGAUUUCAA | 106 |
| 717 | 19 mer | | | |
| STAT3- | Sense | | AUGACUUUGAUUUCAACUA | 107 |
| 720 | 19 mer | | | |
| STAT3- | Sense | | UGACUUUGAUUUCAACUAU | 108 |
| 721 | 19 mer | | | |
| STAT3- | Sense | | GACUUUGAUUUCAACUAUA | 109 |
| 722 | 19 mer | | | |
| STAT3- | Sense | | ACUUUGAUUUCAACUAUAA | 110 |
| 723 | 19 mer | | | |
| STAT3- | Sense | | CUUUGAUUUCAACUAUAAA | 111 |
| 724 | 19 mer | | | |
| STAT3- | Sense | | AAGAUCUGAAUGGAAACAA | 112 |
| 768 | 19 mer | | | |
| STAT3- | Sense | | AUCUGAAUGGAAACAACCA | 113 |
| 771 | 19 mer | | | |
| STAT3- | Sense | | CUGAAUGGAAACAACCAGU | 114 |
| 773 | 19 mer | | | |
| STAT3- | Sense | | AGAAAACUGGAUAACGUCA | 115 |
| 1000 | 19 mer | | | |
| STAT3- | Sense | | GAAAACUGGAUAACGUCAU | 116 |
| 1001 | 19 mer | | | |
| STAT3- | Sense | | AAACUGGAUAACGUCAUUA | 117 |
| 1003 | 19 mer | | | |
| STAT3- | Sense | | CUGGAUAACGUCAUUAGCA | 118 |
| 1006 | 19 mer | | | |
| STAT3- | Sense | | GGAUAACGUCAUUAGCAGA | 119 |
| 1008 | 19 mer | | | |
| STAT3- | Sense | | GAUAACGUCAUUAGCAGAA | 120 |
| 1009 | 19 mer | | | |
| STAT3- | Sense | | AUAACGUCAUUAGCAGAAU | 121 |
| 1010 | 19 mer | | | |
| STAT3- | Sense | | AACAAAUUAAGAAACUGGA | 122 |
| 1047 | 19 mer | | | |
| STAT3- | Sense | | GAGUUGCAGCAAAAAGUUU | 123 |
| 1067 | 19 mer | | | |
| STAT3- | Sense | | AGUUGCAGCAAAAAGUUUC | 124 |
| 1068 | 19 mer | | | |
| STAT3- | Sense | | CUGUUUAGAAACUUAAUGA | 125 |
| 1145 | 19 mer | | | |
| STAT3- | Sense | | AGAAACUUAAUGAAAAGUG | 126 |
| 1151 | 19 mer | | | |
| STAT3- | Sense | | CAGUUCACUACUAAAGUCA | 127 |
| 1241 | 19 mer | | | |
| STAT3- | Sense | | GUCAAAUUCCCUGAGUUGA | 128 |
| 1268 | 19 mer | | | |
| STAT3- | Sense | | AAUUCCCUGAGUUGAAUUA | 129 |
| 1272 | 19 mer | | | |
| STAT3- | Sense | | AUUCCCUGAGUUGAAUUAU | 130 |
| 1273 | 19 mer | | | |
| STAT3- | Sense | | UCCCUGAGUUGAAUUAUCA | 131 |
| 1275 | 19 mer | | | |
| STAT3- | Sense | | CCUGAGUUGAAUUAUCAGC | 132 |
| 1277 | 19 mer | | | |
| STAT3- | Sense | | CUGAGUUGAAUUAUCAGCU | 133 |
| 1278 | 19 mer | | | |
| STAT3- | Sense | | UGAGUUGAAUUAUCAGCUU | 134 |
| 1279 | 19 mer | | | |
| STAT3- | Sense | | GAGUUGAAUUAUCAGCUUA | 135 |
| 1280 | 19 mer | | | |
| STAT3- | Sense | | AGUUGAAUUAUCAGCUUAA | 136 |
| 1281 | 19 mer | | | |
| STAT3- | Sense | | GUUGAAUUAUCAGCUUAAA | 137 |
| 1282 | 19 mer | | | |
| STAT3- | Sense | | UUGAAUUAUCAGCUUAAAA | 138 |
| 1283 | 19 mer | | | |
| STAT3- | Sense | | UGAAUUAUCAGCUUAAAAU | 139 |
| 1284 | 19 mer | | | |
| STAT3- | Sense | | AAUUAUCAGCUUAAAAUUA | 140 |
| 1286 | 19 mer | | | |
| STAT3- | Sense | | AUUAUCAGCUUAAAAUUAA | 141 |
| 1287 | 19 mer | | | |
| STAT3- | Sense | | CAGCUUAAAAUUAAAGUGU | 142 |
| 1292 | 19 mer | | | |
| STAT3- | Sense | | AGCUUAAAAUUAAAGUGUG | 143 |
| 1293 | 19 mer | | | |
| STAT3- | Sense | | AAAUUAAAGUGUGCAUUGA | 144 |
| 1299 | 19 mer | | | |
| STAT3- | Sense | | AAGUGUGCAUUGACAAAGA | 145 |
| 1305 | 19 mer | | | |
| STAT3- | Sense | | CAAAAGUGAUGAACAUGGA | 146 |
| 1383 | 19 mer | | | |
| STAT3- | Sense | | GUGAUGAACAUGGAAGAAU | 147 |
| 1388 | 19 mer | | | |
| STAT3- | Sense | | GCAGAAUUCAAACACUUGA | 148 |
| 1427 | 19 mer | | | |
| STAT3- | Sense | | AUUGUGAUGCUUCCCUGAU | 149 |
| 1485 | 19 mer | | | |
| STAT3- | Sense | | CCUUGCCAGUUGUGGUGAU | 150 |
| 1584 | 19 mer | | | |
| STAT3- | Sense | | UUGCCAGUUGUGGUGAUCU | 151 |
| 1586 | 19 mer | | | |
| STAT3- | Sense | | CCCAAGAAUGUAAACUUUU | 152 |
| 1670 | 19 mer | | | |
| STAT3- | Sense | | CCAAGAAUGUAAACUUUUU | 153 |
| 1671 | 19 mer | | | |
| STAT3- | Sense | | CAAGAAUGUAAACUUUUUU | 154 |
| 1672 | 19 mer | | | |
| STAT3- | Sense | | AAGAAUGUAAACUUUUUUA | 155 |
| 1673 | 19 mer | | | |
| STAT3- | Sense | | AGAAUGUAAACUUUUUUAC | 156 |
| 1674 | 19 mer | | | |
| STAT3- | Sense | | AAUGUAAACUUUUUUACCA | 157 |
| 1676 | 19 mer | | | |
| STAT3- | Sense | | ACCUGGUGUGAAUUAUUCA | 158 |
| 1813 | 19 mer | | | |
| STAT3- | Sense | | CUGGUGUGAAUUAUUCAGG | 159 |
| 1815 | 19 mer | | | |
| STAT3- | Sense | | GGUGUGAAUUAUUCAGGGU | 160 |
| 1817 | 19 mer | | | |
| STAT3- | Sense | | UGUGAAUUAUUCAGGGUGU | 161 |
| 1819 | 19 mer | | | |
| STAT3- | Sense | | CUGGACAAUAUCAUUGACC | 162 |
| 1904 | 19 mer | | | |
| STAT3- | Sense | | GGACAAUAUCAUUGACCUU | 163 |
| 1906 | 19 mer | | | |
| STAT3- | Sense | | GACAAUAUCAUUGACCUUG | 164 |
| 1907 | 19 mer | | | |
| STAT3- | Sense | | ACAAUAUCAUUGACCUUGU | 165 |
| 1908 | 19 mer | | | |
| STAT3- | Sense | | CAAUAUCAUUGACCUUGUG | 166 |
| 1909 | 19 mer | | | |
| STAT3- | Sense | | AAUAUCAUUGACCUUGUGA | 167 |
| 1910 | 19 mer | | | |
| STAT3- | Sense | | AUAUCAUUGACCUUGUGAA | 168 |
| 1911 | 19 mer | | | |
| STAT3- | Sense | | UAUCAUUGACCUUGUGAAA | 169 |
| 1912 | 19 mer | | | |
| STAT3- | Sense | | AUCAUUGACCUUGUGAAAA | 170 |
| 1913 | 19 mer | | | |
| STAT3- | Sense | | UCAUUGACCUUGUGAAAAA | 171 |
| 1914 | 19 mer | | | |
| STAT3- | Sense | | AUUGACCUUGUGAAAAAGU | 172 |
| 1916 | 19 mer | | | |
| STAT3- | Sense | | UUGACCUUGUGAAAAAGUA | 173 |
| 1917 | 19 mer | | | |
| STAT3- | Sense | | GACCUUGUGAAAAAGUACA | 174 |
| 1919 | 19 mer | | | |
| STAT3- | Sense | | ACCUUGUGAAAAAGUACAU | 175 |
| 1920 | 19 mer | | | |
| STAT3- | Sense | | ACCUUCCUGCUAAGAUUCA | 176 |
| 2024 | 19 mer | | | |
| STAT3- | Sense | | AAGCAGCAGCUGAACAACA | 177 |
| 2135 | 19 mer | | | |
| STAT3- | Sense | | AGCAGCAGCUGAACAACAU | 178 |
| 2136 | 19 mer | | | |
| STAT3- | Sense | | CAGCAGCUGAACAACAUGU | 179 |
| 2138 | 19 mer | | | |
| STAT3- | Sense | | AGCAGCUGAACAACAUGUC | 180 |
| 2139 | 19 mer | | | |
| STAT3- | Sense | | GCUGAACAACAUGUCAUUU | 181 |
| 2143 | 19 mer | | | |
| STAT3- | Sense | | CUGAACAACAUGUCAUUUG | 182 |
| 2144 | 19 mer | | | |
| STAT3- | Sense | | UGAACAACAUGUCAUUUGC | 183 |
| 2145 | 19 mer | | | |
| STAT3- | Sense | | GAACAACAUGUCAUUUGCU | 184 |
| 2146 | 19 mer | | | |
| STAT3- | Sense | | AACAACAUGUCAUUUGCUG | 185 |
| 2147 | 19 mer | | | |
| STAT3- | Sense | | ACAACAUGUCAUUUGCUGA | 186 |
| 2148 | 19 mer | | | |
| STAT3- | Sense | | ACAUGUCAUUUGCUGAAAU | 187 |
| 2151 | 19 mer | | | |
| STAT3- | Sense | | AUGUCAUUUGCUGAAAUCA | 188 |
| 2153 | 19 mer | | | |
| STAT3- | Sense | | UGUCAUUUGCUGAAAUCAU | 189 |
| 2154 | 19 mer | | | |
| STAT3- | Sense | | UUUGCUGAAAUCAUCAUGG | 190 |
| 2159 | 19 mer | | | |
| STAT3- | Sense | | CAUACCUGAAGACCAAGUU | 191 |
| 2322 | 19 mer | | | |
| STAT3- | Sense | | ACCUGAAGACCAAGUUUAU | 192 |
| 2325 | 19 mer | | | |
| STAT3- | Sense | | CUGAAGACCAAGUUUAUCU | 193 |
| 2327 | 19 mer | | | |
| STAT3- | Sense | | GAAGACCAAGUUUAUCUGU | 194 |
| 2329 | 19 mer | | | |
| STAT3- | Sense | | ACCAAGUUUAUCUGUGUGA | 195 |
| 2333 | 19 mer | | | |
| STAT3- | Sense | | CAAGUUUAUCUGUGUGACA | 196 |
| 2335 | 19 mer | | | |
| STAT3- | Sense | | AGAUUCAUUGAUGCAGUUU | 197 |
| 2404 | 19 mer | | | |
| STAT3- | Sense | | GAUUCAUUGAUGCAGUUUG | 198 |
| 2405 | 19 mer | | | |
| STAT3- | Sense | | UUCAUUGAUGCAGUUUGGA | 199 |
| 2407 | 19 mer | | | |
| STAT3- | Sense | | UCAUUGAUGCAGUUUGGAA | 200 |
| 2408 | 19 mer | | | |
| STAT3- | Sense | | UUGAUGCAGUUUGGAAAUA | 201 |
| 2411 | 19 mer | | | |
| STAT3- | Sense | | UGAUGCAGUUUGGAAAUAA | 202 |
| 2412 | 19 mer | | | |
| STAT3- | Sense | | GAUGCAGUUUGGAAAUAAU | 203 |
| 2413 | 19 mer | | | |
| STAT3- | Sense | | GCAGUUUGGAAAUAAUGGU | 204 |
| 2416 | 19 mer | | | |
| STAT3- | Sense | | AGUUUGGAAAUAAUGGUGA | 205 |
| 2418 | 19 mer | | | |
| STAT3- | Sense | | UGGAAAUAAUGGUGAAGGU | 206 |
| 2422 | 19 mer | | | |
| STAT3- | Sense | | AUAAUGGUGAAGGUGCUGA | 207 |
| 2427 | 19 mer | | | |
| STAT3- | Sense | | CUGAAACUACUAACUUUGU | 208 |
| 2612 | 19 mer | | | |
| STAT3- | Sense | | AAACUACUAACUUUGUGGU | 209 |
| 2615 | 19 mer | | | |
| STAT3- | Sense | | AACUACUAACUUUGUGGUU | 210 |
| 2616 | 19 mer | | | |
| STAT3- | Sense | | ACUACUAACUUUGUGGUUC | 211 |
| 2617 | 19 mer | | | |
| STAT3- | Sense | | UAACUUUGUGGUUCCAGAU | 212 |
| 2622 | 19 mer | | | |
| STAT3- | Sense | | CUUUGUGGUUCCAGAUUUU | 213 |
| 2625 | 19 mer | | | |
| STAT3- | Sense | | UUUGUGGUUCCAGAUUUUU | 214 |
| 2626 | 19 mer | | | |
| STAT3- | Sense | | UUGUGGUUCCAGAUUUUUU | 215 |
| 2627 | 19 mer | | | |
| STAT3- | Sense | | AAAUAGAGAAAUGAGUGAA | 216 |
| 2692 | 19 mer | | | |
| STAT3- | Sense | | AAUAGAGAAAUGAGUGAAU | 217 |
| 2693 | 19 mer | | | |
| STAT3- | Sense | | GGUGAUCUGCUUUUAUCUA | 218 |
| 2715 | 19 mer | | | |
| STAT3- | Sense | | AUCUGCUUUUAUCUAAAUG | 219 |
| 2719 | 19 mer | | | |
| STAT3- | Sense | | CUGCUUUUAUCUAAAUGCA | 220 |
| 2721 | 19 mer | | | |
| STAT3- | Sense | | AUGCAAAUAAGGAUGUGUU | 221 |
| 2735 | 19 mer | | | |
| STAT3- | Sense | | AUAAGGAUGUGUUCUCUGA | 222 |
| 2741 | 19 mer | | | |
| STAT3- | Sense | | GAAAAAGGAAAUGUCUUGU | 223 |
| 2801 | 19 mer | | | |
| STAT3- | Sense | | AAAAGGAAAUGUCUUGUGU | 224 |
| 2803 | 19 mer | | | |
| STAT3- | Sense | | AAAGGAAAUGUCUUGUGUU | 225 |
| 2804 | 19 mer | | | |
| STAT3- | Sense | | AGGAAAUGUCUUGUGUUGU | 226 |
| 2806 | 19 mer | | | |
| STAT3- | Sense | | GGAAAUGUCUUGUGUUGUU | 227 |
| 2807 | 19 mer | | | |
| STAT3- | Sense | | GAAAUGUCUUGUGUUGUUU | 228 |
| 2808 | 19 mer | | | |
| STAT3- | Sense | | AAAUGUCUUGUGUUGUUUU | 229 |
| 2809 | 19 mer | | | |
| STAT3- | Sense | | AAUGUCUUGUGUUGUUUUG | 230 |
| 2810 | 19 mer | | | |
| STAT3- | Sense | | AUGUCUUGUGUUGUUUUGU | 231 |
| 2811 | 19 mer | | | |
| STAT3- | Sense | | UGUCUUGUGUUGUUUUGUU | 232 |
| 2812 | 19 mer | | | |
| STAT3- | Sense | | GUCUUGUGUUGUUUUGUUC | 233 |
| 2813 | 19 mer | | | |
| STAT3- | Sense | | CUCAGCAGCUUUUUGUUAU | 234 |
| 2846 | 19 mer | | | |
| STAT3- | Sense | | CAGCAGCUUUUUGUUAUUG | 235 |
| 2848 | 19 mer | | | |
| STAT3- | Sense | | AGCAGCUUUUUGUUAUUGU | 236 |
| 2849 | 19 mer | | | |
| STAT3- | Sense | | GCAGCUUUUUGUUAUUGUU | 237 |
| 2850 | 19 mer | | | |
| STAT3- | Sense | | CAGCUUUUUGUUAUUGUUG | 238 |
| 2851 | 19 mer | | | |
| STAT3- | Sense | | AGCUUUUUGUUAUUGUUGU | 239 |
| 2852 | 19 mer | | | |
| STAT3- | Sense | | GCUUUUUGUUAUUGUUGUU | 240 |
| 2853 | 19 mer | | | |
| STAT3- | Sense | | CUUUUUGUUAUUGUUGUUG | 241 |
| 2854 | 19 mer | | | |
| STAT3- | Sense | | UUUUUGUUAUUGUUGUUGU | 242 |
| 2855 | 19 mer | | | |
| STAT3- | Sense | | UUUUGUUAUUGUUGUUGUU | 243 |
| 2856 | 19 mer | | | |
| STAT3- | Sense | | UUUGUUAUUGUUGUUGUUG | 244 |
| 2857 | 19 mer | | | |
| STAT3- | Sense | | UUGUUAUUGUUGUUGUUGU | 245 |
| 2858 | 19 mer | | | |
| STAT3- | Sense | | UGUUAUUGUUGUUGUUGUU | 246 |
| 2859 | 19 mer | | | |
| STAT3- | Sense | | GUUAUUGUUGUUGUUGUUC | 247 |
| 2860 | 19 mer | | | |
| STAT3- | Sense | | UUAUUGUUGUUGUUGUUCU | 248 |
| 2861 | 19 mer | | | |
| STAT3- | Sense | | UAUUGUUGUUGUUGUUCUU | 249 |
| 2862 | 19 mer | | | |
| STAT3- | Sense | | AUUGUUGUUGUUGUUCUUA | 250 |
| 2863 | 19 mer | | | |
| STAT3- | Sense | | UGUUGUUGUUGUUCUUAGA | 251 |
| 2865 | 19 mer | | | |
| STAT3- | Sense | | UUGUUGUUGUUCUUAGACA | 252 |
| 2867 | 19 mer | | | |
| STAT3- | Sense | | UGUUGUUGUUCUUAGACAA | 253 |
| 2868 | 19 mer | | | |
| STAT3- | Sense | | CUUUUUAACCUUGCUGACA | 254 |
| 2975 | 19 mer | | | |
| STAT3- | Sense | | UUAACCUUGCUGACAUCCA | 255 |
| 2979 | 19 mer | | | |
| STAT3- | Sense | | UUGCUGACAUCCAAAUAGA | 256 |
| 2985 | 19 mer | | | |
| STAT3- | Sense | | AGGUUUCUUUUUAAAUUAA | 257 |
| 3025 | 19 mer | | | |
| STAT3- | Sense | | AAAUUAAGAAAUAAUAACA | 258 |
| 3037 | 19 mer | | | |
| STAT3- | Sense | | AAUUAAGAAAUAAUAACAA | 259 |
| 3038 | 19 mer | | | |
| STAT3- | Sense | | AUUAAGAAAUAAUAACAAU | 260 |
| 3039 | 19 mer | | | |
| STAT3- | Sense | | UAAGAAAUAAUAACAAUUA | 26 |
| 3041 | 19 mer | | | |
| STAT3- | Sense | | AAGAAAUAAUAACAAUUAA | 262 |
| 3042 | 19 mer | | | |
| STAT3- | Sense | | AGAAAUAAUAACAAUUAAA | 263 |
| 3043 | 19 mer | | | |
| STAT3- | Sense | | ACUAAAAGUACAAAAAAUU | 264 |
| 3225 | 19 mer | | | |
| STAT3- | Sense | | CUAAAAGUACAAAAAAUUA | 265 |
| 3226 | 19 mer | | | |
| STAT3- | Sense | | AGACUUAUUUUCCUUUGUA | 266 |
| 3605 | 19 mer | | | |
| STAT3- | Sense | | AUUUUCCUUUGUAAUGUAU | 267 |
| 3611 | 19 mer | | | |
| STAT3- | Sense | | AGUUACAGGUUGGACAUGA | 268 |
| 3906 | 19 mer | | | |
| STAT3- | Sense | | UGUGGAAUUCUGUUUGUUA | 269 |
| 4311 | 19 mer | | | |
| STAT3- | Sense | | GGAAUUCUGUUUGUUAAAU | 270 |
| 4314 | 19 mer | | | |
| STAT3- | Sense | | AUUCUGUUUGUUAAAUCAA | 271 |
| 4317 | 19 mer | | | |
| STAT3- | Sense | | UGUUUGUUAAAUCAAAUUA | 272 |
| 4321 | 19 mer | | | |
| STAT3- | Sense | | ACAUAAUAAGCUUAACUGA | 273 |
| 4465 | 19 mer | | | |
| STAT3- | Sense | | ACUGAUAAACAGAAUAUUU | 274 |
| 4479 | 19 mer | | | |
| STAT3- | Sense | | CUGAUAAACAGAAUAUUUA | 275 |
| 4480 | 19 mer | | | |
| STAT3- | Sense | | UAGUGUAAAAAUUUAUAUU | 276 |
| 4831 | 19 mer | | | |
| STAT3- | Sense | | GUGUAAAAAUUUAUAUUAU | 277 |
| 4833 | 19 mer | | | |
| STAT3- | Sense | | UAAAAAUUUAUAUUAUUGU | 278 |
| 4836 | 19 mer | | | |
| STAT3- | Sense | | AAAAAUUUAUAUUAUUGUG | 279 |
| 4837 | 19 mer | | | |
| STAT3- | Sense | | UUUAACUUCCAGAAAUAAA | 280 |
| 4909 | 19 mer | | | |
| STAT3- | Antisense | | AUUAUGAAACACCAAAGUG | 281 |
| 370 | 19 mer | | | |
| STAT3- | Antisense | | AGAUUAUGAAACACCAAAG | 282 |
| 372 | 19 mer | | | |
| STAT3- | Antisense | | AACAUUCGACUCUUGCAGG | 283 |
| 424 | 19 mer | | | |
| STAT3- | Antisense | | GAACAUUCGACUCUUGCAG | 284 |
| 425 | 19 mer | | | |
| STAT3- | Antisense | | AGAACAUUCGACUCUUGCA | 285 |
| 426 | 19 mer | | | |
| STAT3- | Antisense | | UAGAGAACAUUCGACUCUU | 286 |
| 429 | 19 mer | | | |
| STAT3- | Antisense | | AUAGAGAACAUUCGACUCU | 287 |
| 430 | 19 mer | | | |
| STAT3- | Antisense | | UGAUAGAGAACAUUCGACU | 288 |
| 432 | 19 mer | | | |
| STAT3- | Antisense | | CUGAUAGAGAACAUUCGAC | 289 |
| 433 | 19 mer | | | |
| STAT3- | Antisense | | AAACUGCUUGAUUCUUCGU | 290 |
| 460 | 19 mer | | | |
| STAT3- | Antisense | | GAAACUGCUUGAUUCUUCG | 291 |
| 461 | 19 mer | | | |
| STAT3- | Antisense | | AGAAACUGCUUGAUUCUUC | 292 |
| 462 | 19 mer | | | |
| STAT3- | Antisense | | UCCAUUGGCUUCUCAAGAU | 293 |
| 492 | 19 mer | | | |
| STAT3- | Antisense | | AUUUUCUGUUCUAGAUCCU | 294 |
| 678 | 19 mer | | | |
| STAT3- | Antisense | | UUCAUUUUCUGUUCUAGAU | 295 |
| 681 | 19 mer | | | |
| STAT3- | Antisense | | GAAAUCAAAGUCAUCCUGG | 296 |
| 715 | 19 mer | | | |
| STAT3- | Antisense | | UGAAAUCAAAGUCAUCCUG | 297 |
| 716 | 19 mer | | | |
| STAT3- | Antisense | | UUGAAAUCAAAGUCAUCCU | 298 |
| 717 | 19 mer | | | |
| STAT3- | Antisense | | UAGUUGAAAUCAAAGUCAU | 299 |
| 720 | 19 mer | | | |
| STAT3- | Antisense | | AUAGUUGAAAUCAAAGUCA | 300 |
| 721 | 19 mer | | | |
| STAT3- | Antisense | | UAUAGUUGAAAUCAAAGUC | 301 |
| 722 | 19 mer | | | |
| STAT3- | Antisense | | UUAUAGUUGAAAUCAAAGU | 302 |
| 723 | 19 mer | | | |
| STAT3- | Antisense | | UUUAUAGUUGAAAUCAAAG | 303 |
| 724 | 19 mer | | | |
| STAT3- | Antisense | | UUGUUUCCAUUCAGAUCUU | 304 |
| 768 | 19 mer | | | |
| STAT3- | Antisense | | UGGUUGUUUCCAUUCAGAU | 305 |
| 771 | 19 mer | | | |
| STAT3- | Antisense | | ACUGGUUGUUUCCAUUCAG | 306 |
| 773 | 19 mer | | | |
| STAT3- | Antisense | | UGACGUUAUCCAGUUUUCU | 307 |
| 1000 | 19 mer | | | |
| STAT3- | Antisense | | AUGACGUUAUCCAGUUUUC | 308 |
| 1001 | 19 mer | | | |
| STAT3- | Antisense | | UAAUGACGUUAUCCAGUUU | 309 |
| 1003 | 19 mer | | | |
| STAT3- | Antisense | | UGCUAAUGACGUUAUCCAG | 310 |
| 1006 | 19 mer | | | |
| STAT3- | Antisense | | UCUGCUAAUGACGUUAUCC | 311 |
| 1008 | 19 mer | | | |
| STAT3- | Antisense | | UUCUGCUAAUGACGUUAUC | 312 |
| 1009 | 19 mer | | | |
| STAT3- | Antisense | | AUUCUGCUAAUGACGUUAU | 313 |
| 1010 | 19 mer | | | |
| STAT3- | Antisense | | UCCAGUUUCUUAAUUUGUU | 314 |
| 1047 | 19 mer | | | |
| STAT3- | Antisense | | AAACUUUUUGCUGCAACUC | 315 |
| 1067 | 19 mer | | | |
| STAT3- | Antisense | | GAAACUUUUUGCUGCAACU | 316 |
| 1068 | 19 mer | | | |
| STAT3- | Antisense | | UCAUUAAGUUUCUAAACAG | 317 |
| 1145 | 19 mer | | | |
| STAT3- | Antisense | | CACUUUUCAUUAAGUUUCU | 318 |
| 1151 | 19 mer | | | |
| STAT3- | Antisense | | UGACUUUAGUAGUGAACUG | 319 |
| 1241 | 19 mer | | | |
| STAT3- | Antisense | | UCAACUCAGGGAAUUUGAC | 320 |
| 1268 | 19 mer | | | |
| STAT3- | Antisense | | UAAUUCAACUCAGGGAAUU | 321 |
| 1272 | 19 mer | | | |
| STAT3- | Antisense | | AUAAUUCAACUCAGGGAAU | 322 |
| 1273 | 19 mer | | | |
| STAT3- | Antisense | | UGAUAAUUCAACUCAGGGA | 323 |
| 1275 | 19 mer | | | |
| STAT3- | Antisense | | GCUGAUAAUUCAACUCAGG | 324 |
| 1277 | 19 mer | | | |
| STAT3- | Antisense | | AGCUGAUAAUUCAACUCAG | 325 |
| 1278 | 19 mer | | | |
| STAT3- | Antisense | | AAGCUGAUAAUUCAACUCA | 326 |
| 1279 | 19 mer | | | |
| STAT3- | Antisense | | UAAGCUGAUAAUUCAACUC | 327 |
| 1280 | 19 mer | | | |
| STAT3- | Antisense | | UUAAGCUGAUAAUUCAACU | 328 |
| 1281 | 19 mer | | | |
| STAT3- | Antisense | | UUUAAGCUGAUAAUUCAAC | 329 |
| 1282 | 19 mer | | | |
| STAT3- | Antisense | | UUUUAAGCUGAUAAUUCAA | 330 |
| 1283 | 19 mer | | | |
| STAT3- | Antisense | | AUUUUAAGCUGAUAAUUCA | 331 |
| 1284 | 19 mer | | | |
| STAT3- | Antisense | | UAAUUUUAAGCUGAUAAUU | 332 |
| 1286 | 19 mer | | | |
| STAT3- | Antisense | | UUAAUUUUAAGCUGAUAAU | 333 |
| 1287 | 19 mer | | | |
| STAT3- | Antisense | | ACACUUUAAUUUUAAGCUG | 334 |
| 1292 | 19 mer | | | |
| STAT3- | Antisense | | CACACUUUAAUUUUAAGCU | 335 |
| 1293 | 19 mer | | | |
| STAT3- | Antisense | | UCAAUGCACACUUUAAUUU | 336 |
| 1299 | 19 mer | | | |
| STAT3- | Antisense | | UCUUUGUCAAUGCACACUU | 337 |
| 1305 | 19 mer | | | |
| STAT3- | Antisense | | UCCAUGUUCAUCACUUUUG | 338 |
| 1383 | 19 mer | | | |
| STAT3- | Antisense | | AUUCUUCCAUGUUCAUCAC | 339 |
| 1388 | 19 mer | | | |
| STAT3- | Antisense | | UCAAGUGUUUGAAUUCUGC | 340 |
| 1427 | 19 mer | | | |
| STAT3- | Antisense | | AUCAGGGAAGCAUCACAAU | 341 |
| 1485 | 19 mer | | | |
| STAT3- | Antisense | | AUCACCACAACUGGCAAGG | 342 |
| 1584 | 19 mer | | | |
| STAT3- | Antisense | | AGAUCACCACAACUGGCAA | 343 |
| 1586 | 19 mer | | | |
| STAT3- | Antisense | | AAAAGUUUACAUUCUUGGG | 344 |
| 1670 | 19 mer | | | |
| STAT3- | Antisense | | AAAAAGUUUACAUUCUUGG | 345 |
| 1671 | 19 mer | | | |
| STAT3- | Antisense | | AAAAAAGUUUACAUUCUUG | 346 |
| 1672 | 19 mer | | | |
| STAT3- | Antisense | | UAAAAAAGUUUACAUUCUU | 347 |
| 1673 | 19 mer | | | |
| STAT3- | Antisense | | GUAAAAAAGUUUACAUUCU | 348 |
| 1674 | 19 mer | | | |
| STAT3- | Antisense | | UGGUAAAAAAGUUUACAUU | 349 |
| 1676 | 19 mer | | | |
| STAT3- | Antisense | | UGAAUAAUUCACACCAGGU | 350 |
| 1813 | 19 mer | | | |
| STAT3- | Antisense | | CCUGAAUAAUUCACACCAG | 351 |
| 1815 | 19 mer | | | |
| STAT3- | Antisense | | ACCCUGAAUAAUUCACACC | 352 |
| 1817 | 19 mer | | | |
| STAT3- | Antisense | | ACACCCUGAAUAAUUCACA | 353 |
| 1819 | 19 mer | | | |
| STAT3- | Antisense | | GGUCAAUGAUAUUGUCCAG | 354 |
| 1904 | 19 mer | | | |
| STAT3- | Antisense | | AAGGUCAAUGAUAUUGUCC | 355 |
| 1906 | 19 mer | | | |
| STAT3- | Antisense | | CAAGGUCAAUGAUAUUGUC | 356 |
| 1907 | 19 mer | | | |
| STAT3- | Antisense | | ACAAGGUCAAUGAUAUUGU | 357 |
| 1908 | 19 mer | | | |
| STAT3- | Antisense | | CACAAGGUCAAUGAUAUUG | 358 |
| 1909 | 19 mer | | | |
| STAT3- | Antisense | | UCACAAGGUCAAUGAUAUU | 359 |
| 1910 | 19 mer | | | |
| STAT3- | Antisense | | UUCACAAGGUCAAUGAUAU | 360 |
| 1911 | 19 mer | | | |
| STAT3- | Antisense | | UUUCACAAGGUCAAUGAUA | 361 |
| 1912 | 19 mer | | | |
| STAT3- | Antisense | | UUUUCACAAGGUCAAUGAU | 362 |
| 1913 | 19 mer | | | |
| STAT3- | Antisense | | UUUUUCACAAGGUCAAUGA | 363 |
| 1914 | 19 mer | | | |
| STAT3- | Antisense | | ACUUUUUCACAAGGUCAAU | 364 |
| 1916 | 19 mer | | | |
| STAT3- | Antisense | | UACUUUUUCACAAGGUCAA | 365 |
| 1917 | 19 mer | | | |
| STAT3- | Antisense | | UGUACUUUUUCACAAGGUC | 366 |
| 1919 | 19 mer | | | |
| STAT3- | Antisense | | AUGUACUUUUUCACAAGGU | 367 |
| 1920 | 19 mer | | | |
| STAT3- | Antisense | | UGAAUCUUAGCAGGAAGGU | 368 |
| 2024 | 19 mer | | | |
| STAT3- | Antisense | | UGUUGUUCAGCUGCUGCUU | 369 |
| 2135 | 19 mer | | | |
| STAT3- | Antisense | | AUGUUGUUCAGCUGCUGCU | 370 |
| 2136 | 19 mer | | | |
| STAT3- | Antisense | | ACAUGUUGUUCAGCUGCUG | 371 |
| 2138 | 19 mer | | | |
| STAT3- | Antisense | | GACAUGUUGUUCAGCUGCU | 372 |
| 2139 | 19 mer | | | |
| STAT3- | Antisense | | AAAUGACAUGUUGUUCAGC | 373 |
| 2143 | 19 mer | | | |
| STAT3- | Antisense | | CAAAUGACAUGUUGUUCAG | 374 |
| 2144 | 19 mer | | | |
| STAT3- | Antisense | | GCAAAUGACAUGUUGUUCA | 375 |
| 2145 | 19 mer | | | |
| STAT3- | Antisense | | AGCAAAUGACAUGUUGUUC | 376 |
| 2146 | 19 mer | | | |
| STAT3- | Antisense | | CAGCAAAUGACAUGUUGUU | 377 |
| 2147 | 19 mer | | | |
| STAT3- | Antisense | | UCAGCAAAUGACAUGUUGU | 378 |
| 2148 | 19 mer | | | |
| STAT3- | Antisense | | AUUUCAGCAAAUGACAUGU | 379 |
| 2151 | 19 mer | | | |
| STAT3- | Antisense | | UGAUUUCAGCAAAUGACAU | 380 |
| 2153 | 19 mer | | | |
| STAT3- | Antisense | | AUGAUUUCAGCAAAUGACA | 381 |
| 2154 | 19 mer | | | |
| STAT3- | Antisense | | CCAUGAUGAUUUCAGCAAA | 382 |
| 2159 | 19 mer | | | |
| STAT3- | Antisense | | AACUUGGUCUUCAGGUAUG | 383 |
| 2322 | 19 mer | | | |
| STAT3- | Antisense | | AUAAACUUGGUCUUCAGGU | 384 |
| 2325 | 19 mer | | | |
| STAT3- | Antisense | | AGAUAAACUUGGUCUUCAG | 385 |
| 2327 | 19 mer | | | |
| STAT3- | Antisense | | ACAGAUAAACUUGGUCUUC | 386 |
| 2329 | 19 mer | | | |
| STAT3- | Antisense | | UCACACAGAUAAACUUGGU | 387 |
| 2333 | 19 mer | | | |
| STAT3- | Antisense | | UGUCACACAGAUAAACUUG | 388 |
| 2335 | 19 mer | | | |
| STAT3- | Antisense | | AAACUGCAUCAAUGAAUCU | 389 |
| 2404 | 19 mer | | | |
| STAT3- | Antisense | | CAAACUGCAUCAAUGAAUC | 390 |
| 2405 | 19 mer | | | |
| STAT3- | Antisense | | UCCAAACUGCAUCAAUGAA | 391 |
| 2407 | 19 mer | | | |
| STAT3- | Antisense | | UUCCAAACUGCAUCAAUGA | 392 |
| 2408 | 19 mer | | | |
| STAT3- | Antisense | | UAUUUCCAAACUGCAUCAA | 393 |
| 2411 | 19 mer | | | |
| STAT3- | Antisense | | UUAUUUCCAAACUGCAUCA | 394 |
| 2412 | 19 mer | | | |
| STAT3- | Antisense | | AUUAUUUCCAAACUGCAUC | 395 |
| 2413 | 19 mer | | | |
| STAT3- | Antisense | | ACCAUUAUUUCCAAACUGC | 396 |
| 2416 | 19 mer | | | |
| STAT3- | Antisense | | UCACCAUUAUUUCCAAACU | 397 |
| 2418 | 19 mer | | | |
| STAT3- | Antisense | | ACCUUCACCAUUAUUUCCA | 398 |
| 2422 | 19 mer | | | |
| STAT3- | Antisense | | UCAGCACCUUCACCAUUAU | 399 |
| 2427 | 19 mer | | | |
| STAT3- | Antisense | | ACAAAGUUAGUAGUUUCAG | 400 |
| 2612 | 19 mer | | | |
| STAT3- | Antisense | | ACCACAAAGUUAGUAGUUU | 401 |
| 2615 | 19 mer | | | |
| STAT3- | Antisense | | AACCACAAAGUUAGUAGUU | 402 |
| 2616 | 19 mer | | | |
| STAT3- | Antisense | | GAACCACAAAGUUAGUAGU | 403 |
| 2617 | 19 mer | | | |
| STAT3- | Antisense | | AUCUGGAACCACAAAGUUA | 404 |
| 2622 | 19 mer | | | |
| STAT3- | Antisense | | AAAAUCUGGAACCACAAAG | 405 |
| 2625 | 19 mer | | | |
| STAT3- | Antisense | | AAAAAUCUGGAACCACAAA | 406 |
| 2626 | 19 mer | | | |
| STAT3- | Antisense | | AAAAAAUCUGGAACCACAA | 407 |
| 2627 | 19 mer | | | |
| STAT3- | Antisense | | UUCACUCAUUUCUCUAUUU | 408 |
| 2692 | 19 mer | | | |
| STAT3- | Antisense | | AUUCACUCAUUUCUCUAUU | 409 |
| 2693 | 19 mer | | | |
| STAT3- | Antisense | | UAGAUAAAAGCAGAUCACC | 410 |
| 2715 | 19 mer | | | |
| STAT3- | Antisense | | CAUUUAGAUAAAAGCAGAU | 411 |
| 2719 | 19 mer | | | |
| STAT3- | Antisense | | UGCAUUUAGAUAAAAGCAG | 412 |
| 2721 | 19 mer | | | |
| STAT3- | Antisense | | AACACAUCCUUAUUUGCAU | 413 |
| 2735 | 19 mer | | | |
| STAT3- | Antisense | | UCAGAGAACACAUCCUUAU | 414 |
| 2741 | 19 mer | | | |
| STAT3- | Antisense | | ACAAGACAUUUCCUUUUUC | 415 |
| 2801 | 19 mer | | | |
| STAT3- | Antisense | | ACACAAGACAUUUCCUUUU | 416 |
| 2803 | 19 mer | | | |
| STAT3- | Antisense | | AACACAAGACAUUUCCUUU | 417 |
| 2804 | 19 mer | | | |
| STAT3- | Antisense | | ACAACACAAGACAUUUCCU | 418 |
| 2806 | 19 mer | | | |
| STAT3- | Antisense | | AACAACACAAGACAUUUCC | 419 |
| 2807 | 19 mer | | | |
| STAT3- | Antisense | | AAACAACACAAGACAUUUC | 420 |
| 2808 | 19 mer | | | |
| STAT3- | Antisense | | AAAACAACACAAGACAUUU | 421 |
| 2809 | 19 mer | | | |
| STAT3- | Antisense | | CAAAACAACACAAGACAUU | 422 |
| 2810 | 19 mer | | | |
| STAT3- | Antisense | | ACAAAACAACACAAGACAU | 423 |
| 2811 | 19 mer | | | |
| STAT3- | Antisense | | AACAAAACAACACAAGACA | 424 |
| 2812 | 19 mer | | | |
| STAT3- | Antisense | | GAACAAAACAACACAAGAC | 425 |
| 2813 | 19 mer | | | |
| STAT3- | Antisense | | AUAACAAAAAGCUGCUGAG | 426 |
| 2846 | 19 mer | | | |
| STAT3- | Antisense | | CAAUAACAAAAAGCUGCUG | 427 |
| 2848 | 19 mer | | | |
| STAT3- | Antisense | | ACAAUAACAAAAAGCUGCU | 428 |
| 2849 | 19 mer | | | |
| STAT3- | Antisense | | AACAAUAACAAAAAGCUGC | 429 |
| 2850 | 19 mer | | | |
| STAT3- | Antisense | | CAACAAUAACAAAAAGCUG | 430 |
| 2851 | 19 mer | | | |
| STAT3- | Antisense | | ACAACAAUAACAAAAAGCU | 431 |
| 2852 | 19 mer | | | |
| STAT3- | Antisense | | AACAACAAUAACAAAAAGC | 432 |
| 2853 | 19 mer | | | |
| STAT3- | Antisense | | CAACAACAAUAACAAAAAG | 433 |
| 2854 | 19 mer | | | |
| STAT3- | Antisense | | ACAACAACAAUAACAAAAA | 434 |
| 2855 | 19 mer | | | |
| STAT3- | Antisense | | AACAACAACAAUAACAAAA | 435 |
| 2856 | 19 mer | | | |
| STAT3- | Antisense | | CAACAACAACAAUAACAAA | 436 |
| 2857 | 19 mer | | | |
| STAT3- | Antisense | | ACAACAACAACAAUAACAA | 437 |
| 2858 | 19 mer | | | |
| STAT3- | Antisense | | AACAACAACAACAAUAACA | 438 |
| 2859 | 19 mer | | | |
| STAT3- | Antisense | | GAACAACAACAACAAUAAC | 439 |
| 2860 | 19 mer | | | |
| STAT3- | Antisense | | AGAACAACAACAACAAUAA | 440 |
| 2861 | 19 mer | | | |
| STAT3- | Antisense | | AAGAACAACAACAACAAUA | 441 |
| 2862 | 19 mer | | | |
| STAT3- | Antisense | | UAAGAACAACAACAACAAU | 442 |
| 2863 | 19 mer | | | |
| STAT3- | Antisense | | UCUAAGAACAACAACAACA | 443 |
| 2865 | 19 mer | | | |
| STAT3- | Antisense | | UGUCUAAGAACAACAACAA | 444 |
| 2867 | 19 mer | | | |
| STAT3- | Antisense | | UUGUCUAAGAACAACAACA | 445 |
| 2868 | 19 mer | | | |
| STAT3- | Antisense | | UGUCAGCAAGGUUAAAAAG | 446 |
| 2975 | 19 mer | | | |
| STAT3- | Antisense | | UGGAUGUCAGCAAGGUUAA | 447 |
| 2979 | 19 mer | | | |
| STAT3- | Antisense | | UCUAUUUGGAUGUCAGCAA | 448 |
| 2985 | 19 mer | | | |
| STAT3- | Antisense | | UUAAUUUAAAAAGAAACCU | 449 |
| 3025 | 19 mer | | | |
| STAT3- | Antisense | | UGUUAUUAUUUCUUAAUUU | 450 |
| 3037 | 19 mer | | | |
| STAT3- | Antisense | | UUGUUAUUAUUUCUUAAUU | 451 |
| 3038 | 19 mer | | | |
| STAT3- | Antisense | | AUUGUUAUUAUUUCUUAAU | 452 |
| 3039 | 19 mer | | | |
| STAT3- | Antisense | | UAAUUGUUAUUAUUUCUUA | 453 |
| 3041 | 19 mer | | | |
| STAT3- | Antisense | | UUAAUUGUUAUUAUUUCUU | 454 |
| 3042 | 19 mer | | | |
| STAT3- | Antisense | | UUUAAUUGUUAUUAUUUCU | 455 |
| 3043 | 19 mer | | | |
| STAT3- | Antisense | | AAUUUUUUGUACUUUUAGU | 456 |
| 3225 | 19 mer | | | |
| STAT3- | Antisense | | UAAUUUUUUGUACUUUUAG | 457 |
| 3226 | 19 mer | | | |
| STAT3- | Antisense | | UACAAAGGAAAAUAAGUCU | 458 |
| 3605 | 19 mer | | | |
| STAT3- | Antisense | | AUACAUUACAAAGGAAAAU | 459 |
| 3611 | 19 mer | | | |
| STAT3- | Antisense | | UCAUGUCCAACCUGUAACU | 460 |
| 3906 | 19 mer | | | |
| STAT3- | Antisense | | UAACAAACAGAAUUCCACA | 461 |
| 4311 | 19 mer | | | |
| STAT3- | Antisense | | AUUUAACAAACAGAAUUCC | 462 |
| 4314 | 19 mer | | | |
| STAT3- | Antisense | | UUGAUUUAACAAACAGAAU | 463 |
| 4317 | 19 mer | | | |
| STAT3- | Antisense | | UAAUUUGAUUUAACAAACA | 464 |
| 4321 | 19 mer | | | |
| STAT3- | Antisense | | UCAGUUAAGCUUAUUAUGU | 465 |
| 4465 | 19 mer | | | |
| STAT3- | Antisense | | AAAUAUUCUGUUUAUCAGU | 466 |
| 4479 | 19 mer | | | |
| STAT3- | Antisense | | UAAAUAUUCUGUUUAUCAG | 467 |
| 4480 | 19 mer | | | |
| STAT3- | Antisense | | AAUAUAAAUUUUUACACUA | 468 |
| 4831 | 19 mer | | | |
| STAT3- | Antisense | | AUAAUAUAAAUUUUUACAC | 469 |
| 4833 | 19 mer | | | |
| STAT3- | Antisense | | ACAAUAAUAUAAAUUUUUA | 470 |
| 4836 | 19 mer | | | |
| STAT3- | Antisense | | CACAAUAAUAUAAAUUUUU | 471 |
| 4837 | 19 mer | | | |
| STAT3- | Antisense | | UUUAUUUCUGGAAGUUAAA | 472 |
| 4909 | 19 mer | | | |
| STAT3- | 25 mer | | CACUUUGGUGUUUCAUAAUAGCAGC | 473 |
| 370 | Sense | | | |
| | Strand | | | |
| STAT3- | 25 mer | | CUUUGGUGUUUCAUAAUCUAGCAGC | 474 |
| 372 | Sense | | | |
| | Strand | | | |
| STAT3- | 25 mer | | CCUGCAAGAGUCGAAUGUUAGCAGC | 475 |
| 424 | Sense | | | |
| | Strand | | | |
| STAT3- | 25 mer | | CUGCAAGAGUCGAAUGUUCAGCAGC | 476 |
| 425 | Sense | | | |
| | Strand | | | |
| STAT3- | 25 mer | | UGCAAGAGUCGAAUGUUCUAGCAGC | 477 |
| 426 | Sense | | | |
| | Strand | | | |
| STAT3- | 25 mer | | AAGAGUCGAAUGUUCUCUAAGCAGC | 478 |
| 429 | Sense | | | |
| | Strand | | | |
| STAT3- | 25 mer | | AGAGUCGAAUGUUCUCUAUAGCAGC | 479 |
| 430 | Sense | | | |
| | Strand | | | |
| STAT3- | 25 mer | | AGUCGAAUGUUCUCUAUCAAGCAGC | 480 |
| 432 | Sense | | | |
| | Strand | | | |
| STAT3- | 25 mer | | GUCGAAUGUUCUCUAUCAGAGCAGC | 481 |
| 433 | Sense | | | |
| | Strand | | | |
| STAT3- | 25 mer | | ACGAAGAAUCAAGCAGUUUAGCAGC | 482 |
| 460 | Sense | | | |
| | Strand | | | |
| STAT3- | 25 mer | | CGAAGAAUCAAGCAGUUUCAGCAGC | 483 |
| 461 | Sense | | | |
| | Strand | | | |
| STAT3- | 25 mer | | GAAGAAUCAAGCAGUUUCUAGCAGC | 484 |
| 462 | Sense | | | |
| | Strand | | | |
| STAT3- | 25 mer | | AUCUUGAGAAGCCAAUGGAAGCAGC | 485 |
| 492 | Sense | | | |
| | Strand | | | |
| STAT3- | 25 mer | | AGGAUCUAGAACAGAAAAUAGCAGC | 486 |
| 678 | Sense | | | |
| | Strand | | | |
| STAT3- | 25 mer | | AUCUAGAACAGAAAAUGAAAGCAGC | 487 |
| 681 | Sense | | | |
| | Strand | | | |
| STAT3- | 25 mer | | CCAGGAUGACUUUGAUUUCAGCAGC | 488 |
| 715 | Sense | | | |
| | Strand | | | |
| STAT3- | 25 mer | | CAGGAUGACUUUGAUUUCAAGCAGC | 489 |
| 716 | Sense | | | |
| | Strand | | | |
| STAT3- | 25 mer | | AGGAUGACUUUGAUUUCAAAGCAGC | 490 |
| 717 | Sense | | | |
| | Strand | | | |
| STAT3- | 25 mer | | AUGACUUUGAUUUCAACUAAGCAGC | 491 |
| 720 | Sense | | | |
| | Strand | | | |
| STAT3- | 25 mer | | UGACUUUGAUUUCAACUAUAGCAGC | 492 |
| 721 | Sense | | | |
| | Strand | | | |
| STAT3- | 25 mer | | GACUUUGAUUUCAACUAUAAGCAGC | 493 |
| 722 | Sense | | | |
| | Strand | | | |
| STAT3- | 25 mer | | ACUUUGAUUUCAACUAUAAAGCAGC | 494 |
| 723 | Sense | | | |
| | Strand | | | |
| STAT3- | 25 mer | | CUUUGAUUUCAACUAUAAAAGCAGC | 495 |
| 724 | Sense | | | |
| | Strand | | | |
| STAT3- | 25 mer | | AAGAUCUGAAUGGAAACAAAGCAGC | 496 |
| 768 | Sense | | | |
| | Strand | | | |
| STAT3- | 25 mer | | AUCUGAAUGGAAACAACCAAGCAGC | 497 |
| 771 | Sense | | | |
| | Strand | | | |
| STAT3- | 25 mer | | CUGAAUGGAAACAACCAGUAGCAGC | 498 |
| 773 | Sense | | | |
| | Strand | | | |
| STAT3- | 25 mer | | AGAAAACUGGAUAACGUCAAGCAGC | 499 |
| 1000 | Sense | | | |
| | Strand | | | |
| STAT3- | 25 mer | | GAAAACUGGAUAACGUCAUAGCAGC | 500 |
| 1001 | Sense | | | |
| | Strand | | | |
| STAT3- | 25 mer | | AAACUGGAUAACGUCAUUAAGCAGC | 501 |
| 1003 | Sense | | | |
| | Strand | | | |
| STAT3- | 25 mer | | CUGGAUAACGUCAUUAGCAAGCAGC | 502 |
| 1006 | Sense | | | |
| | Strand | | | |
| STAT3- | 25 mer | | GGAUAACGUCAUUAGCAGAAGCAGC | 503 |
| 1008 | Sense | | | |
| | Strand | | | |
| STAT3- | 25 mer | | GAUAACGUCAUUAGCAGAAAGCAGC | 504 |
| 1009 | Sense | | | |
| | Strand | | | |
| STAT3- | 25 mer | | AUAACGUCAUUAGCAGAAUAGCAGC | 505 |
| 1010 | Sense | | | |
| | Strand | | | |
| STAT3- | 25 mer | | AACAAAUUAAGAAACUGGAAGCAGC | 506 |
| 1047 | Sense | | | |
| | Strand | | | |
| STAT3- | 25 mer | | GAGUUGCAGCAAAAAGUUUAGCAGC | 507 |
| 1067 | Sense | | | |
| | Strand | | | |
| STAT3- | 25 mer | | AGUUGCAGCAAAAAGUUUCAGCAGC | 508 |
| 1068 | Sense | | | |
| | Strand | | | |
| STAT3- | 25 mer | | CUGUUUAGAAACUUAAUGAAGCAGC | 509 |
| 1145 | Sense | | | |
| | Strand | | | |
| STAT3- | 25 mer | | AGAAACUUAAUGAAAAGUGAGCAGC | 510 |
| 1151 | Sense | | | |
| | Strand | | | |
| STAT3- | 25 mer | | CAGUUCACUACUAAAGUCAAGCAGC | 511 |
| 1241 | Sense | | | |
| | Strand | | | |
| STAT3- | 25 mer | | GUCAAAUUCCCUGAGUUGAAGCAGC | 512 |
| 1268 | Sense | | | |
| | Strand | | | |
| STAT3- | 25 mer | | AAUUCCCUGAGUUGAAUUAAGCAGC | 513 |
| 1272 | Sense | | | |
| | Strand | | | |
| STAT3- | 25 mer | | AUUCCCUGAGUUGAAUUAUAGCAGC | 514 |
| 1273 | Sense | | | |
| | Strand | | | |
| STAT3- | 25 mer | | UCCCUGAGUUGAAUUAUCAAGCAGC | 515 |
| 1275 | Sense | | | |
| | Strand | | | |
| STAT3- | 25 mer | | CCUGAGUUGAAUUAUCAGCAGCAGC | 516 |
| 1277 | Sense | | | |
| | Strand | | | |
| STAT3- | 25 mer | | CUGAGUUGAAUUAUCAGCUAGCAGC | 517 |
| 1278 | Sense | | | |
| | Strand | | | |
| STAT3- | 25 mer | | UGAGUUGAAUUAUCAGCUUAGCAGC | 518 |
| 1279 | Sense | | | |
| | Strand | | | |
| STAT3- | 25 mer | | GAGUUGAAUUAUCAGCUUAAGCAGC | 519 |
| 1280 | Sense | | | |
| | Strand | | | |
| STAT3- | 25 mer | | AGUUGAAUUAUCAGCUUAAAGCAGC | 520 |
| 1281 | Sense | | | |
| | Strand | | | |
| STAT3- | 25 mer | | GUUGAAUUAUCAGCUUAAAAGCAGC | 521 |
| 1282 | Sense | | | |
| | Strand | | | |
| STAT3- | 25 mer | | UUGAAUUAUCAGCUUAAAAAGCAGC | 522 |
| 1283 | Sense | | | |
| | Strand | | | |
| STAT3- | 25 mer | | UGAAUUAUCAGCUUAAAAUAGCAGC | 523 |
| 1284 | Sense | | | |
| | Strand | | | |
| STAT3- | 25 mer | | AAUUAUCAGCUUAAAAUUAAGCAGC | 524 |
| 1286 | Sense | | | |
| | Strand | | | |
| STAT3- | 25 mer | | AUUAUCAGCUUAAAAUUAAAGCAGC | 525 |
| 1287 | Sense | | | |
| | Strand | | | |
| STAT3- | 25 mer | | CAGCUUAAAAUUAAAGUGUAGCAGC | 526 |
| 1292 | Sense | | | |
| | Strand | | | |
| STAT3- | 25 mer | | AGCUUAAAAUUAAAGUGUGAGCAGC | 527 |
| 1293 | Sense | | | |
| | Strand | | | |
| STAT3- | 25 mer | | AAAUUAAAGUGUGCAUUGAAGCAGC | 528 |
| 1299 | Sense | | | |
| | Strand | | | |
| STAT3- | 25 mer | | AAGUGUGCAUUGACAAAGAAGCAGC | 529 |
| 1305 | Sense | | | |
| | Strand | | | |
| STAT3- | 25 mer | | CAAAAGUGAUGAACAUGGAAGCAGC | 530 |
| 1383 | Sense | | | |
| | Strand | | | |
| STAT3- | 25 mer | | GUGAUGAACAUGGAAGAAUAGCAGC | 531 |
| 1388 | Sense | | | |
| | Strand | | | |
| STAT3- | 25 mer | | GCAGAAUUCAAACACUUGAAGCAGC | 532 |
| 1427 | Sense | | | |
| | Strand | | | |
| STAT3- | 25 mer | | AUUGUGAUGCUUCCCUGAUAGCAGC | 533 |
| 1485 | Sense | | | |
| | Strand | | | |
| STAT3- | 25 mer | | CCUUGCCAGUUGUGGUGAUAGCAGC | 534 |
| 1584 | Sense | | | |
| | Strand | | | |
| STAT3- | 25 mer | | UUGCCAGUUGUGGUGAUCUAGCAGC | 535 |
| 1586 | Sense | | | |
| | Strand | | | |
| STAT3- | 25 mer | | CCCAAGAAUGUAAACUUUUAGCAGC | 536 |
| 1670 | Sense | | | |
| | Strand | | | |
| STAT3- | 25 mer | | CCAAGAAUGUAAACUUUUUAGCAGC | 537 |
| 1671 | Sense | | | |
| | Strand | | | |
| STAT3- | 25 mer | | CAAGAAUGUAAACUUUUUUAGCAGC | 538 |
| 1672 | Sense | | | |
| | Strand | | | |
| STAT3- | 25 mer | | AAGAAUGUAAACUUUUUUAAGCAGC | 539 |
| 1673 | Sense | | | |
| | Strand | | | |
| STAT3- | 25 mer | | AGAAUGUAAACUUUUUUACAGCAGC | 540 |
| 1674 | Sense | | | |
| | Strand | | | |
| STAT3- | 25 mer | | AAUGUAAACUUUUUUACCAAGCAGC | 541 |
| 1676 | Sense | | | |
| | Strand | | | |
| STAT3- | 25 mer | | ACCUGGUGUGAAUUAUUCAAGCAGC | 542 |
| 1813 | Sense | | | |
| | Strand | | | |
| STAT3- | 25 mer | | CUGGUGUGAAUUAUUCAGGAGCAGC | 543 |
| 1815 | Sense | | | |
| | Strand | | | |
| STAT3- | 25 mer | | GGUGUGAAUUAUUCAGGGUAGCAGC | 544 |
| 1817 | Sense | | | |
| | Strand | | | |
| STAT3- | 25 mer | | UGUGAAUUAUUCAGGGUGUAGCAGC | 545 |
| 1819 | Sense | | | |
| | Strand | | | |
| STAT3- | 25 mer | | CUGGACAAUAUCAUUGACCAGCAGC | 546 |
| 1904 | Sense | | | |
| | Strand | | | |
| STAT3- | 25 mer | | GGACAAUAUCAUUGACCUUAGCAGC | 547 |
| 1906 | Sense | | | |
| | Strand | | | |
| STAT3- | 25 mer | | GACAAUAUCAUUGACCUUGAGCAGC | 548 |
| 1907 | Sense | | | |
| | Strand | | | |
| STAT3- | 25 mer | | ACAAUAUCAUUGACCUUGUAGCAGC | 549 |
| 1908 | Sense | | | |
| | Strand | | | |
| STAT3- | 25 mer | | CAAUAUCAUUGACCUUGUGAGCAGC | 550 |
| 1909 | Sense | | | |
| | Strand | | | |
| STAT3- | 25 mer | | AAUAUCAUUGACCUUGUGAAGCAGC | 551 |
| 1910 | Sense | | | |
| | Strand | | | |
| STAT3- | 25 mer | | AUAUCAUUGACCUUGUGAAAGCAGC | 552 |
| 1911 | Sense | | | |
| | Strand | | | |
| STAT3- | 25 mer | | UAUCAUUGACCUUGUGAAAAGCAGC | 553 |
| 1912 | Sense | | | |
| | Strand | | | |
| STAT3- | 25 mer | | AUCAUUGACCUUGUGAAAAAGCAGC | 554 |
| 1913 | Sense | | | |
| | Strand | | | |
| STAT3- | 25 mer | | UCAUUGACCUUGUGAAAAAAGCAGC | 555 |
| 1914 | Sense | | | |
| | Strand | | | |
| STAT3- | 25 mer | | AUUGACCUUGUGAAAAAGUAGCAGC | 556 |
| 1916 | Sense | | | |
| | Strand | | | |
| STAT3- | 25 mer | | UUGACCUUGUGAAAAAGUAAGCAGC | 557 |
| 1917 | Sense | | | |
| | Strand | | | |
| STAT3- | 25 mer | | GACCUUGUGAAAAAGUACAAGCAGC | 558 |
| 1919 | Sense | | | |
| | Strand | | | |
| STAT3- | 25 mer | | ACCUUGUGAAAAAGUACAUAGCAGC | 559 |
| 1920 | Sense | | | |
| | Strand | | | |
| STAT3- | 25 mer | | ACCUUCCUGCUAAGAUUCAAGCAGC | 560 |
| 2024 | Sense | | | |
| | Strand | | | |
| STAT3- | 25 mer | | AAGCAGCAGCUGAACAACAAGCAGC | 561 |
| 2135 | Sense | | | |
| | Strand | | | |
| STAT3- | 25 mer | | AGCAGCAGCUGAACAACAUAGCAGC | 562 |
| 2136 | Sense | | | |
| | Strand | | | |
| STAT3- | 25 mer | | CAGCAGCUGAACAACAUGUAGCAGC | 563 |
| 2138 | Sense | | | |
| | Strand | | | |
| STAT3- | 25 mer | | AGCAGCUGAACAACAUGUCAGCAGC | 564 |
| 2139 | Sense | | | |
| | Strand | | | |
| STAT3- | 25 mer | | GCUGAACAACAUGUCAUUUAGCAGC | 565 |
| 2143 | Sense | | | |
| | Strand | | | |
| STAT3- | 25 mer | | CUGAACAACAUGUCAUUUGAGCAGC | 566 |
| 2144 | Sense | | | |
| | Strand | | | |
| STAT3- | 25 mer | | UGAACAACAUGUCAUUUGCAGCAGC | 567 |
| 2145 | Sense | | | |
| | Strand | | | |
| STAT3- | 25 mer | | GAACAACAUGUCAUUUGCUAGCAGC | 568 |
| 2146 | Sense | | | |
| | Strand | | | |
| STAT3- | 25 mer | | AACAACAUGUCAUUUGCUGAGCAGC | 569 |
| 2147 | Sense | | | |
| | Strand | | | |
| STAT3- | 25 mer | | ACAACAUGUCAUUUGCUGAAGCAGC | 570 |
| 2148 | Sense | | | |
| | Strand | | | |
| STAT3- | 25 mer | | ACAUGUCAUUUGCUGAAAUAGCAGC | 571 |
| 2151 | Sense | | | |
| | Strand | | | |
| STAT3- | 25 mer | | AUGUCAUUUGCUGAAAUCAAGCAGC | 572 |
| 2153 | Sense | | | |
| | Strand | | | |
| STAT3- | 25 mer | | UGUCAUUUGCUGAAAUCAUAGCAGC | 573 |
| 2154 | Sense | | | |
| | Strand | | | |
| STAT3- | 25 mer | | UUUGCUGAAAUCAUCAUGGAGCAGC | 574 |
| 2159 | Sense | | | |
| | Strand | | | |
| STAT3- | 25 mer | | CAUACCUGAAGACCAAGUUAGCAGC | 575 |
| 2322 | Sense | | | |
| | Strand | | | |
| STAT3- | 25 mer | | ACCUGAAGACCAAGUUUAUAGCAGC | 576 |
| 2325 | Sense | | | |
| | Strand | | | |
| STAT3- | 25 mer | | CUGAAGACCAAGUUUAUCUAGCAGC | 577 |
| 2327 | Sense | | | |
| | Strand | | | |
| STAT3- | 25 mer | | GAAGACCAAGUUUAUCUGUAGCAGC | 578 |
| 2329 | Sense | | | |
| | Strand | | | |
| STAT3- | 25 mer | | ACCAAGUUUAUCUGUGUGAAGCAGC | 579 |
| 2333 | Sense | | | |
| | Strand | | | |
| STAT3- | 25 mer | | CAAGUUUAUCUGUGUGACAAGCAGC | 580 |
| 2335 | Sense | | | |
| | Strand | | | |
| STAT3- | 25 mer | | AGAUUCAUUGAUGCAGUUUAGCAGC | 581 |
| 2404 | Sense | | | |
| | Strand | | | |
| STAT3- | 25 mer | | GAUUCAUUGAUGCAGUUUGAGCAGC | 582 |
| 2405 | Sense | | | |
| | Strand | | | |
| STAT3- | 25 mer | | UUCAUUGAUGCAGUUUGGAAGCAGC | 583 |
| 2407 | Sense | | | |
| | Strand | | | |
| STAT3- | 25 mer | | UCAUUGAUGCAGUUUGGAAAGCAGC | 584 |
| 2408 | Sense | | | |
| | Strand | | | |
| STAT3- | 25 mer | | UUGAUGCAGUUUGGAAAUAAGCAGC | 585 |
| 2411 | Sense | | | |
| | Strand | | | |
| STAT3- | 25 mer | | UGAUGCAGUUUGGAAAUAAAGCAGC | 586 |
| 2412 | Sense | | | |
| | Strand | | | |
| STAT3- | 25 mer | | GAUGCAGUUUGGAAAUAAUAGCAGC | 587 |
| 2413 | Sense | | | |
| | Strand | | | |
| STAT3- | 25 mer | | GCAGUUUGGAAAUAAUGGUAGCAGC | 588 |
| 2416 | Sense | | | |
| | Strand | | | |
| STAT3- | 25 mer | | AGUUUGGAAAUAAUGGUGAAGCAGC | 589 |
| 2418 | Sense | | | |
| | Strand | | | |
| STAT3- | 25 mer | | UGGAAAUAAUGGUGAAGGUAGCAGC | 590 |
| 2422 | Sense | | | |
| | Strand | | | |
| STAT3- | 25 mer | | AUAAUGGUGAAGGUGCUGAAGCAGC | 591 |
| 2427 | Sense | | | |
| | Strand | | | |
| STAT3- | 25 mer | | CUGAAACUACUAACUUUGUAGCAGC | 592 |
| 2612 | Sense | | | |
| | Strand | | | |
| STAT3- | 25 mer | | AAACUACUAACUUUGUGGUAGCAGC | 593 |
| 2615 | Sense | | | |
| | Strand | | | |
| STAT3- | 25 mer | | AACUACUAACUUUGUGGUUAGCAGC | 594 |
| 2616 | Sense | | | |
| | Strand | | | |
| STAT3- | 25 mer | | ACUACUAACUUUGUGGUUCAGCAGC | 595 |
| 2617 | Sense | | | |
| | Strand | | | |
| STAT3- | 25 mer | | UAACUUUGUGGUUCCAGAUAGCAGC | 596 |
| 2622 | Sense | | | |
| | Strand | | | |
| STAT3- | 25 mer | | CUUUGUGGUUCCAGAUUUUAGCAGC | 597 |
| 2625 | Sense | | | |
| | Strand | | | |
| STAT3- | 25 mer | | UUUGUGGUUCCAGAUUUUUAGCAGC | 598 |
| 2626 | Sense | | | |
| | Strand | | | |
| STAT3- | 25 mer | | UUGUGGUUCCAGAUUUUUUAGCAGC | 599 |
| 2627 | Sense | | | |
| | Strand | | | |
| STAT3- | 25 mer | | AAAUAGAGAAAUGAGUGAAAGCAGC | 600 |
| 2692 | Sense | | | |
| | Strand | | | |
| STAT3- | 25 mer | | AAUAGAGAAAUGAGUGAAUAGCAGC | 601 |
| 2693 | Sense | | | |
| | Strand | | | |
| STAT3- | 25 mer | | GGUGAUCUGCUUUUAUCUAAGCAGC | 602 |
| 2715 | Sense | | | |
| | Strand | | | |
| STAT3- | 25 mer | | AUCUGCUUUUAUCUAAAUGAGCAGC | 603 |
| 2719 | Sense | | | |
| | Strand | | | |
| STAT3- | 25 mer | | CUGCUUUUAUCUAAAUGCAAGCAGC | 604 |
| 2721 | Sense | | | |
| | Strand | | | |
| STAT3- | 25 mer | | AUGCAAAUAAGGAUGUGUUAGCAGC | 605 |
| 2735 | Sense | | | |
| | Strand | | | |
| STAT3- | 25 mer | | AUAAGGAUGUGUUCUCUGAAGCAGC | 606 |
| 2741 | Sense | | | |
| | Strand | | | |
| STAT3- | 25 mer | | GAAAAAGGAAAUGUCUUGUAGCAGC | 607 |
| 2801 | Sense | | | |
| | Strand | | | |
| STAT3- | 25 mer | | AAAAGGAAAUGUCUUGUGUAGCAGC | 608 |
| 2803 | Sense | | | |
| | Strand | | | |
| STAT3- | 25 mer | | AAAGGAAAUGUCUUGUGUUAGCAGC | 609 |
| 2804 | Sense | | | |
| | Strand | | | |
| STAT3- | 25 mer | | AGGAAAUGUCUUGUGUUGUAGCAGC | 610 |
| 2806 | Sense | | | |
| | Strand | | | |
| STAT3- | 25 mer | | GGAAAUGUCUUGUGUUGUUAGCAGC | 611 |
| 2807 | Sense | | | |
| | Strand | | | |
| STAT3- | 25 mer | | GAAAUGUCUUGUGUUGUUUAGCAGC | 612 |
| 2808 | Sense | | | |
| | Strand | | | |
| STAT3- | 25 mer | | AAAUGUCUUGUGUUGUUUUAGCAGC | 613 |
| 2809 | Sense | | | |
| | Strand | | | |
| STAT3- | 25 mer | | AAUGUCUUGUGUUGUUUUGAGCAGC | 614 |
| 2810 | Sense | | | |
| | Strand | | | |
| STAT3- | 25 mer | | AUGUCUUGUGUUGUUUUGUAGCAGC | 615 |
| 2811 | Sense | | | |
| | Strand | | | |
| STAT3- | 25 mer | | UGUCUUGUGUUGUUUUGUUAGCAGC | 616 |
| 2812 | Sense | | | |
| | Strand | | | |
| STAT3- | 25 mer | | GUCUUGUGUUGUUUUGUUCAGCAGC | 617 |
| 2813 | Sense | | | |
| | Strand | | | |
| STAT3- | 25 mer | | CUCAGCAGCUUUUUGUUAUAGCAGC | 618 |
| 2846 | Sense | | | |
| | Strand | | | |
| STAT3- | 25 mer | | CAGCAGCUUUUUGUUAUUGAGCAGC | 619 |
| 2848 | Sense | | | |
| | Strand | | | |
| STAT3- | 25 mer | | AGCAGCUUUUUGUUAUUGUAGCAGC | 620 |
| 2849 | Sense | | | |
| | Strand | | | |
| STAT3- | 25 mer | | GCAGCUUUUUGUUAUUGUUAGCAGC | 621 |
| 2850 | Sense | | | |
| | Strand | | | |
| STAT3- | 25 mer | | CAGCUUUUUGUUAUUGUUGAGCAGC | 622 |
| 2851 | Sense | | | |
| | Strand | | | |
| STAT3- | 25 mer | | AGCUUUUUGUUAUUGUUGUAGCAGC | 623 |
| 2852 | Sense | | | |
| | Strand | | | |
| STAT3- | 25 mer | | GCUUUUUGUUAUUGUUGUUAGCAGC | 624 |
| 2853 | Sense | | | |
| | Strand | | | |
| STAT3- | 25 mer | | CUUUUUGUUAUUGUUGUUGAGCAGC | 625 |
| 2854 | Sense | | | |
| | Strand | | | |
| STAT3- | 25 mer | | UUUUUGUUAUUGUUGUUGUAGCAGC | 626 |
| 2855 | Sense | | | |
| | Strand | | | |
| STAT3- | 25 mer | | UUUUGUUAUUGUUGUUGUUAGCAGC | 627 |
| 2856 | Sense | | | |
| | Strand | | | |
| STAT3- | 25 mer | | UUUGUUAUUGUUGUUGUUGAGCAGC | 628 |
| 2857 | Sense | | | |
| | Strand | | | |
| STAT3- | 25 mer | | UUGUUAUUGUUGUUGUUGUAGCAGC | 629 |
| 2858 | Sense | | | |
| | Strand | | | |
| STAT3- | 25 mer | | UGUUAUUGUUGUUGUUGUUAGCAGC | 630 |
| 2859 | Sense | | | |
| | Strand | | | |
| STAT3- | 25 mer | | GUUAUUGUUGUUGUUGUUCAGCAGC | 631 |
| 2860 | Sense | | | |
| | Strand | | | |
| STAT3- | 25 mer | | UUAUUGUUGUUGUUGUUCUAGCAGC | 632 |
| 2861 | Sense | | | |
| | Strand | | | |
| STAT3- | 25 mer | | UAUUGUUGUUGUUGUUCUUAGCAGC | 633 |
| 2862 | Sense | | | |
| | Strand | | | |
| STAT3- | 25 mer | | AUUGUUGUUGUUGUUCUUAAGCAGC | 634 |
| 2863 | Sense | | | |
| | Strand | | | |
| STAT3- | 25 mer | | UGUUGUUGUUGUUCUUAGAAGCAGC | 635 |
| 2865 | Sense | | | |
| | Strand | | | |
| STAT3- | 25 mer | | UUGUUGUUGUUCUUAGACAAGCAGC | 636 |
| 2867 | Sense | | | |
| | Strand | | | |
| STAT3- | 25 mer | | UGUUGUUGUUCUUAGACAAAGCAGC | 637 |
| 2868 | Sense | | | |
| | Strand | | | |
| STAT3- | 25 mer | | CUUUUUAACCUUGCUGACAAGCAGC | 638 |
| 2975 | Sense | | | |
| | Strand | | | |
| STAT3- | 25 mer | | UUAACCUUGCUGACAUCCAAGCAGC | 639 |
| 2979 | Sense | | | |
| | Strand | | | |
| STAT3- | 25 mer | | UUGCUGACAUCCAAAUAGAAGCAGC | 640 |
| 2985 | Sense | | | |
| | Strand | | | |
| STAT3- | 25 mer | | AGGUUUCUUUUUAAAUUAAAGCAGC | 641 |
| 3025 | Sense | | | |
| | Strand | | | |
| STAT3- | 25 mer | | AAAUUAAGAAAUAAUAACAAGCAGC | 642 |
| 3037 | Sense | | | |
| | Strand | | | |
| STAT3- | 25 mer | | AAUUAAGAAAUAAUAACAAAGCAGC | 643 |
| 3038 | Sense | | | |
| | Strand | | | |
| STAT3- | 25 mer | | AUUAAGAAAUAAUAACAAUAGCAGC | 644 |
| 3039 | Sense | | | |
| | Strand | | | |
| STAT3- | 25 mer | | UAAGAAAUAAUAACAAUUAAGCAGC | 645 |
| 3041 | Sense | | | |
| | Strand | | | |
| STAT3- | 25 mer | | AAGAAAUAAUAACAAUUAAAGCAGC | 646 |
| 3042 | Sense | | | |
| | Strand | | | |
| STAT3- | 25 mer | | AGAAAUAAUAACAAUUAAAAGCAGC | 647 |
| 3043 | Sense | | | |
| | Strand | | | |
| STAT3- | 25 mer | | ACUAAAAGUACAAAAAAUUAGCAGC | 648 |
| 3225 | Sense | | | |
| | Strand | | | |
| STAT3- | 25 mer | | CUAAAAGUACAAAAAAUUAAGCAGC | 649 |
| 3226 | Sense | | | |
| | Strand | | | |
| STAT3- | 25 mer | | AGACUUAUUUUCCUUUGUAAGCAGC | 650 |
| 3605 | Sense | | | |
| | Strand | | | |
| STAT3- | 25 mer | | AUUUUCCUUUGUAAUGUAUAGCAGC | 651 |
| 3611 | Sense | | | |
| | Strand | | | |
| STAT3- | 25 mer | | AGUUACAGGUUGGACAUGAAGCAGC | 652 |
| 3906 | Sense | | | |
| | Strand | | | |
| STAT3- | 25 mer | | UGUGGAAUUCUGUUUGUUAAGCAGC | 653 |
| 4311 | Sense | | | |
| | Strand | | | |
| STAT3- | 25 mer | | GGAAUUCUGUUUGUUAAAUAGCAGC | 654 |
| 4314 | Sense | | | |
| | Strand | | | |
| STAT3- | 25 mer | | AUUCUGUUUGUUAAAUCAAAGCAGC | 655 |
| 4317 | Sense | | | |
| | Strand | | | |
| STAT3- | 25 mer | | UGUUUGUUAAAUCAAAUUAAGCAGC | 656 |
| 4321 | Sense | | | |
| | Strand | | | |
| STAT3- | 25 mer | | ACAUAAUAAGCUUAACUGAAGCAGC | 657 |
| 4465 | Sense | | | |
| | Strand | | | |
| STAT3- | 25 mer | | ACUGAUAAACAGAAUAUUUAGCAGC | 658 |
| 4479 | Sense | | | |
| | Strand | | | |
| STAT3- | 25 mer | | CUGAUAAACAGAAUAUUUAAGCAGC | 659 |
| 4480 | Sense | | | |
| | Strand | | | |
| STAT3- | 25 mer | | UAGUGUAAAAAUUUAUAUUAGCAGC | 660 |
| 4831 | Sense | | | |
| | Strand | | | |
| STAT3- | 25 mer | | GUGUAAAAAUUUAUAUUAUAGCAGC | 661 |
| 4833 | Sense | | | |
| | Strand | | | |
| STAT3- | 25 mer | | UAAAAAUUUAUAUUAUUGUAGCAGC | 662 |
| 4836 | Sense | | | |
| | Strand | | | |
| STAT3- | 25 mer | | AAAAAUUUAUAUUAUUGUGAGCAGC | 663 |
| 4837 | Sense | | | |
| | Strand | | | |
| STAT3- | 25 mer | | UUUAACUUCCAGAAAUAAAAGCAGC | 664 |
| 4909 | Sense | | | |
| | Strand | | | |
| STAT3- | 27 mer | | GCUGCUAUUAUGAAACACCAAAGUGGG | 665 |
| 370 | Antisense | | | |
| | Strand | | | |
| STAT3- | 27 mer | | GCUGCUAGAUUAUGAAACACCAAAGGG | 666 |
| 372 | Antisense | | | |
| | Strand | | | |
| STAT3- | 27 mer | | GCUGCUAACAUUCGACUCUUGCAGGGG | 667 |
| 424 | Antisense | | | |
| | Strand | | | |
| STAT3- | 27 mer | | GCUGCUGAACAUUCGACUCUUGCAGGG | 668 |
| 425 | Antisense | | | |
| | Strand | | | |
| STAT3- | 27 mer | | GCUGCUAGAACAUUCGACUCUUGCAGG | 669 |
| 426 | Antisense | | | |
| | Strand | | | |
| STAT3- | 27 mer | | GCUGCUUAGAGAACAUUCGACUCUUGG | 670 |
| 429 | Antisense | | | |
| | Strand | | | |
| STAT3- | 27 mer | | GCUGCUAUAGAGAACAUUCGACUCUGG | 671 |
| 430 | Antisense | | | |
| | Strand | | | |
| STAT3- | 27 mer | | GCUGCUUGAUAGAGAACAUUCGACUGG | 672 |
| 432 | Antisense | | | |
| | Strand | | | |
| STAT3- | 27 mer | | GCUGCUCUGAUAGAGAACAUUCGACGG | 673 |
| 433 | Antisense | | | |
| | Strand | | | |
| STAT3- | 27 mer | | GCUGCUAAACUGCUUGAUUCUUCGUGG | 674 |
| 460 | Antisense | | | |
| | Strand | | | |
| STAT3- | 27 mer | | GCUGCUGAAACUGCUUGAUUCUUCGGG | 675 |
| 461 | Antisense | | | |
| | Strand | | | |
| STAT3- | 27 mer | | GCUGCUAGAAACUGCUUGAUUCUUCGG | 676 |
| 462 | Antisense | | | |
| | Strand | | | |
| STAT3- | 27 mer | | GCUGCUUCCAUUGGCUUCUCAAGAUGG | 677 |
| 492 | Antisense | | | |
| | Strand | | | |
| STAT3- | 27 mer | | GCUGCUAUUUUCUGUUCUAGAUCCUGG | 678 |
| 678 | Antisense | | | |
| | Strand | | | |
| STAT3- | 27 mer | | GCUGCUUUCAUUUUCUGUUCUAGAUGG | 679 |
| 681 | Antisense | | | |
| | Strand | | | |
| STAT3- | 27 mer | | GCUGCUGAAAUCAAAGUCAUCCUGGGG | 680 |
| 715 | Antisense | | | |
| | Strand | | | |
| STAT3- | 27 mer | | GCUGCUUGAAAUCAAAGUCAUCCUGGG | 681 |
| 716 | Antisense | | | |
| | Strand | | | |
| STAT3- | 27 mer | | GCUGCUUUGAAAUCAAAGUCAUCCUGG | 682 |
| 717 | Antisense | | | |
| | Strand | | | |
| STAT3- | 27 mer | | GCUGCUUAGUUGAAAUCAAAGUCAUGG | 683 |
| 720 | Antisense | | | |
| | Strand | | | |
| STAT3- | 27 mer | | GCUGCUAUAGUUGAAAUCAAAGUCAGG | 684 |
| 721 | Antisense | | | |
| | Strand | | | |
| STAT3- | 27 mer | | GCUGCUUAUAGUUGAAAUCAAAGUCGG | 685 |
| 722 | Antisense | | | |
| | Strand | | | |
| STAT3- | 27 mer | | GCUGCUUUAUAGUUGAAAUCAAAGUGG | 686 |
| 723 | Antisense | | | |
| | Strand | | | |
| STAT3- | 27 mer | | GCUGCUUUUAUAGUUGAAAUCAAAGGG | 687 |
| 724 | Antisense | | | |
| | Strand | | | |
| STAT3- | 27 mer | | GCUGCUUUGUUUCCAUUCAGAUCUUGG | 688 |
| 768 | Antisense | | | |
| | Strand | | | |
| STAT3- | 27 mer | | GCUGCUUGGUUGUUUCCAUUCAGAUGG | 689 |
| 771 | Antisense | | | |
| | Strand | | | |
| STAT3- | 27 mer | | GCUGCUACUGGUUGUUUCCAUUCAGGG | 690 |
| 773 | Antisense | | | |
| | Strand | | | |
| STAT3- | 27 mer | | GCUGCUUGACGUUAUCCAGUUUUCUGG | 691 |
| 1000 | Antisense | | | |
| | Strand | | | |
| STAT3- | 27 mer | | GCUGCUAUGACGUUAUCCAGUUUUCGG | 692 |
| 1001 | Antisense | | | |
| | Strand | | | |
| STAT3- | 27 mer | | GCUGCUUAAUGACGUUAUCCAGUUUGG | 693 |
| 1003 | Antisense | | | |
| | Strand | | | |
| STAT3- | 27 mer | | GCUGCUUGCUAAUGACGUUAUCCAGGG | 694 |
| 1006 | Antisense | | | |
| | Strand | | | |
| STAT3- | 27 mer | | GCUGCUUCUGCUAAUGACGUUAUCCGG | 695 |
| 1008 | Antisense | | | |
| | Strand | | | |
| STAT3- | 27 mer | | GCUGCUUUCUGCUAAUGACGUUAUCGG | 696 |
| 1009 | Antisense | | | |
| | Strand | | | |
| STAT3- | 27 mer | | GCUGCUAUUCUGCUAAUGACGUUAUGG | 697 |
| 1010 | Antisense | | | |
| | Strand | | | |
| STAT3- | 27 mer | | GCUGCUUCCAGUUUCUUAAUUUGUUGG | 698 |
| 1047 | Antisense | | | |
| | Strand | | | |
| STAT3- | 27 mer | | GCUGCUAAACUUUUUGCUGCAACUCGG | 699 |
| 1067 | Antisense | | | |
| | Strand | | | |
| STAT3- | 27 mer | | GCUGCUGAAACUUUUUGCUGCAACUGG | 700 |
| 1068 | Antisense | | | |
| | Strand | | | |
| STAT3- | 27 mer | | GCUGCUUCAUUAAGUUUCUAAACAGGG | 701 |
| 1145 | Antisense | | | |
| | Strand | | | |
| STAT3- | 27 mer | | GCUGCUCACUUUUCAUUAAGUUUCUGG | 702 |
| 1151 | Antisense | | | |
| | Strand | | | |
| STAT3- | 27 mer | | GCUGCUUGACUUUAGUAGUGAACUGGG | 703 |
| 1241 | Antisense | | | |
| | Strand | | | |
| STAT3- | 27 mer | | GCUGCUUCAACUCAGGGAAUUUGACGG | 704 |
| 1268 | Antisense | | | |
| | Strand | | | |
| STAT3- | 27 mer | | GCUGCUUAAUUCAACUCAGGGAAUUGG | 705 |
| 1272 | Antisense | | | |
| | Strand | | | |
| STAT3- | 27 mer | | GCUGCUAUAAUUCAACUCAGGGAAUGG | 706 |
| 1273 | Antisense | | | |
| | Strand | | | |
| STAT3- | 27 mer | | GCUGCUUGAUAAUUCAACUCAGGGAGG | 707 |
| 1275 | Antisense | | | |
| | Strand | | | |
| STAT3- | 27 mer | | GCUGCUGCUGAUAAUUCAACUCAGGGG | 708 |
| 1277 | Antisense | | | |
| | Strand | | | |
| STAT3- | 27 mer | | GCUGCUAGCUGAUAAUUCAACUCAGGG | 709 |
| 1278 | Antisense | | | |
| | Strand | | | |
| STAT3- | 27 mer | | GCUGCUAAGCUGAUAAUUCAACUCAGG | 710 |
| 1279 | Antisense | | | |
| | Strand | | | |
| STAT3- | 27 mer | | GCUGCUUAAGCUGAUAAUUCAACUCGG | 711 |
| 1280 | Antisense | | | |
| | Strand | | | |
| STAT3- | 27 mer | | GCUGCUUUAAGCUGAUAAUUCAACUGG | 712 |
| 1281 | Antisense | | | |
| | Strand | | | |
| STAT3- | 27 mer | | GCUGCUUUUAAGCUGAUAAUUCAACGG | 713 |
| 1282 | Antisense | | | |
| | Strand | | | |
| STAT3- | 27 mer | | GCUGCUUUUUAAGCUGAUAAUUCAAGG | 714 |
| 1283 | Antisense | | | |
| | Strand | | | |
| STAT3- | 27 mer | | GCUGCUAUUUUAAGCUGAUAAUUCAGG | 715 |
| 1284 | Antisense | | | |
| | Strand | | | |
| STAT3- | 27 mer | | GCUGCUUAAUUUUAAGCUGAUAAUUGG | 716 |
| 1286 | Antisense | | | |
| | Strand | | | |
| STAT3- | 27 mer | | GCUGCUUUAAUUUUAAGCUGAUAAUGG | 717 |
| 1287 | Antisense | | | |
| | Strand | | | |
| STAT3- | 27 mer | | GCUGCUACACUUUAAUUUUAAGCUGGG | 718 |
| 1292 | Antisense | | | |
| | Strand | | | |
| STAT3- | 27 mer | | GCUGCUCACACUUUAAUUUUAAGCUGG | 719 |
| 1293 | Antisense | | | |
| | Strand | | | |
| STAT3- | 27 mer | | GCUGCUUCAAUGCACACUUUAAUUUGG | 720 |
| 1299 | Antisense | | | |
| | Strand | | | |
| STAT3- | 27 mer | | GCUGCUUCUUUGUCAAUGCACACUUGG | 721 |
| 1305 | Antisense | | | |
| | Strand | | | |
| STAT3- | 27 mer | | GCUGCUUCCAUGUUCAUCACUUUUGGG | 722 |
| 1383 | Antisense | | | |
| | Strand | | | |
| STAT3- | 27 mer | | GCUGCUAUUCUUCCAUGUUCAUCACGG | 723 |
| 1388 | Antisense | | | |
| | Strand | | | |
| STAT3- | 27 mer | | GCUGCUUCAAGUGUUUGAAUUCUGCGG | 724 |
| 1427 | Antisense | | | |
| | Strand | | | |
| STAT3- | 27 mer | | GCUGCUAUCAGGGAAGCAUCACAAUGG | 725 |
| 1485 | Antisense | | | |
| | Strand | | | |
| STAT3- | 27 mer | | GCUGCUAUCACCACAACUGGCAAGGGG | 726 |
| 1584 | Antisense | | | |
| | Strand | | | |
| STAT3- | 27 mer | | GCUGCUAGAUCACCACAACUGGCAAGG | 727 |
| 1586 | Antisense | | | |
| | Strand | | | |
| STAT3- | 27 mer | | GCUGCUAAAAGUUUACAUUCUUGGGGG | 728 |
| 1670 | Antisense | | | |
| | Strand | | | |
| STAT3- | 27 mer | | GCUGCUAAAAAGUUUACAUUCUUGGGG | 729 |
| 1671 | Antisense | | | |
| | Strand | | | |
| STAT3- | 27 mer | | GCUGCUAAAAAAGUUUACAUUCUUGGG | 730 |
| 1672 | Antisense | | | |
| | Strand | | | |
| STAT3- | 27 mer | | GCUGCUUAAAAAAGUUUACAUUCUUGG | 731 |
| 1673 | Antisense | | | |
| | Strand | | | |
| STAT3- | 27 mer | | GCUGCUGUAAAAAAGUUUACAUUCUGG | 732 |
| 1674 | Antisense | | | |
| | Strand | | | |
| STAT3- | 27 mer | | GCUGCUUGGUAAAAAAGUUUACAUUGG | 733 |
| 1676 | Antisense | | | |
| | Strand | | | |
| STAT3- | 27 mer | | GCUGCUUGAAUAAUUCACACCAGGUGG | 734 |
| 1813 | Antisense | | | |
| | Strand | | | |
| STAT3- | 27 mer | | GCUGCUCCUGAAUAAUUCACACCAGGG | 735 |
| 1815 | Antisense | | | |
| | Strand | | | |
| STAT3- | 27 mer | | GCUGCUACCCUGAAUAAUUCACACCGG | 736 |
| 1817 | Antisense | | | |
| | Strand | | | |
| STAT3- | 27 mer | | GCUGCUACACCCUGAAUAAUUCACAGG | 737 |
| 1819 | Antisense | | | |
| | Strand | | | |
| STAT3- | 27 mer | | GCUGCUGGUCAAUGAUAUUGUCCAGGG | 738 |
| 1904 | Antisense | | | |
| | Strand | | | |
| STAT3- | 27 mer | | GCUGCUAAGGUCAAUGAUAUUGUCCGG | 739 |
| 1906 | Antisense | | | |
| | Strand | | | |
| STAT3- | 27 mer | | GCUGCUCAAGGUCAAUGAUAUUGUCGG | 740 |
| 1907 | Antisense | | | |
| | Strand | | | |
| STAT3- | 27 mer | | GCUGCUACAAGGUCAAUGAUAUUGUGG | 741 |
| 1908 | Antisense | | | |
| | Strand | | | |
| STAT3- | 27 mer | | GCUGCUCACAAGGUCAAUGAUAUUGGG | 742 |
| 1909 | Antisense | | | |
| | Strand | | | |
| STAT3- | 27 mer | | GCUGCUUCACAAGGUCAAUGAUAUUGG | 743 |
| 1910 | Antisense | | | |
| | Strand | | | |
| STAT3- | 27 mer | | GCUGCUUUCACAAGGUCAAUGAUAUGG | 744 |
| 1911 | Antisense | | | |
| | Strand | | | |
| STAT3- | 27 mer | | GCUGCUUUUCACAAGGUCAAUGAUAGG | 745 |
| 1912 | Antisense | | | |
| | Strand | | | |
| STAT3- | 27 mer | | GCUGCUUUUUCACAAGGUCAAUGAUGG | 746 |
| 1913 | Antisense | | | |
| | Strand | | | |
| STAT3- | 27 mer | | GCUGCUUUUUUCACAAGGUCAAUGAGG | 747 |
| 1914 | Antisense | | | |
| | Strand | | | |
| STAT3- | 27 mer | | GCUGCUACUUUUUCACAAGGUCAAUGG | 748 |
| 1916 | Antisense | | | |
| | Strand | | | |
| STAT3- | 27 mer | | GCUGCUUACUUUUUCACAAGGUCAAGG | 749 |
| 1917 | Antisense | | | |
| | Strand | | | |
| STAT3- | 27 mer | | GCUGCUUGUACUUUUUCACAAGGUCGG | 750 |
| 1919 | Antisense | | | |
| | Strand | | | |
| STAT3- | 27 mer | | GCUGCUAUGUACUUUUUCACAAGGUGG | 751 |
| 1920 | Antisense | | | |
| | Strand | | | |
| STAT3- | 27 mer | | GCUGCUUGAAUCUUAGCAGGAAGGUGG | 752 |
| 2024 | Antisense | | | |
| | Strand | | | |
| STAT3- | 27 mer | | GCUGCUUGUUGUUCAGCUGCUGCUUGG | 753 |
| 2135 | Antisense | | | |
| | Strand | | | |
| STAT3- | 27 mer | | GCUGCUAUGUUGUUCAGCUGCUGCUGG | 754 |
| 2136 | Antisense | | | |
| | Strand | | | |
| STAT3- | 27 mer | | GCUGCUACAUGUUGUUCAGCUGCUGGG | 755 |
| 2138 | Antisense | | | |
| | Strand | | | |
| STAT3- | 27 mer | | GCUGCUGACAUGUUGUUCAGCUGCUGG | 756 |
| 2139 | Antisense | | | |
| | Strand | | | |
| STAT3- | 27 mer | | GCUGCUAAAUGACAUGUUGUUCAGCGG | 757 |
| 2143 | Antisense | | | |
| | Strand | | | |
| STAT3- | 27 mer | | GCUGCUCAAAUGACAUGUUGUUCAGGG | 758 |
| 2144 | Antisense | | | |
| | Strand | | | |
| STAT3- | 27 mer | | GCUGCUGCAAAUGACAUGUUGUUCAGG | 759 |
| 2145 | Antisense | | | |
| | Strand | | | |
| STAT3- | 27 mer | | GCUGCUAGCAAAUGACAUGUUGUUCGG | 760 |
| 2146 | Antisense | | | |
| | Strand | | | |
| STAT3- | 27 mer | | GCUGCUCAGCAAAUGACAUGUUGUUGG | 761 |
| 2147 | Antisense | | | |
| | Strand | | | |
| STAT3- | 27 mer | | GCUGCUUCAGCAAAUGACAUGUUGUGG | 762 |
| 2148 | Antisense | | | |
| | Strand | | | |
| STAT3- | 27 mer | | GCUGCUAUUUCAGCAAAUGACAUGUGG | 763 |
| 2151 | Antisense | | | |
| | Strand | | | |
| STAT3- | 27 mer | | GCUGCUUGAUUUCAGCAAAUGACAUGG | 764 |
| 2153 | Antisense | | | |
| | Strand | | | |
| STAT3- | 27 mer | | GCUGCUAUGAUUUCAGCAAAUGACAGG | 765 |
| 2154 | Antisense | | | |
| | Strand | | | |
| STAT3- | 27 mer | | GCUGCUCCAUGAUGAUUUCAGCAAAGG | 766 |
| 2159 | Antisense | | | |
| | Strand | | | |
| STAT3- | 27 mer | | GCUGCUAACUUGGUCUUCAGGUAUGGG | 767 |
| 2322 | Antisense | | | |
| | Strand | | | |
| STAT3- | 27 mer | | GCUGCUAUAAACUUGGUCUUCAGGUGG | 768 |
| 2325 | Antisense | | | |
| | Strand | | | |
| STAT3- | 27 mer | | GCUGCUAGAUAAACUUGGUCUUCAGGG | 769 |
| 2327 | Antisense | | | |
| | Strand | | | |
| STAT3- | 27 mer | | GCUGCUACAGAUAAACUUGGUCUUCGG | 770 |
| 2329 | Antisense | | | |
| | Strand | | | |
| STAT3- | 27 mer | | GCUGCUUCACACAGAUAAACUUGGUGG | 771 |
| 2333 | Antisense | | | |
| | Strand | | | |
| STAT3- | 27 mer | | GCUGCUUGUCACACAGAUAAACUUGGG | 772 |
| 2335 | Antisense | | | |
| | Strand | | | |
| STAT3- | 27 mer | | GCUGCUAAACUGCAUCAAUGAAUCUGG | 773 |
| 2404 | Antisense | | | |
| | Strand | | | |
| STAT3- | 27 mer | | GCUGCUCAAACUGCAUCAAUGAAUCGG | 774 |
| 2405 | Antisense | | | |
| | Strand | | | |
| STAT3- | 27 mer | | GCUGCUUCCAAACUGCAUCAAUGAAGG | 775 |
| 2407 | Antisense | | | |
| | Strand | | | |
| STAT3- | 27 mer | | GCUGCUUUCCAAACUGCAUCAAUGAGG | 776 |
| 2408 | Antisense | | | |
| | Strand | | | |
| STAT3- | 27 mer | | GCUGCUUAUUUCCAAACUGCAUCAAGG | 777 |
| 2411 | Antisense | | | |
| | Strand | | | |
| STAT3- | 27 mer | | GCUGCUUUAUUUCCAAACUGCAUCAGG | 778 |
| 2412 | Antisense | | | |
| | Strand | | | |
| STAT3- | 27 mer | | GCUGCUAUUAUUUCCAAACUGCAUCGG | 779 |
| 2413 | Antisense | | | |
| | Strand | | | |
| STAT3- | 27 mer | | GCUGCUACCAUUAUUUCCAAACUGCGG | 780 |
| 2416 | Antisense | | | |
| | Strand | | | |
| STAT3- | 27 mer | | GCUGCUUCACCAUUAUUUCCAAACUGG | 781 |
| 2418 | Antisense | | | |
| | Strand | | | |
| STAT3- | 27 mer | | GCUGCUACCUUCACCAUUAUUUCCAGG | 782 |
| 2422 | Antisense | | | |
| | Strand | | | |
| STAT3- | 27 mer | | GCUGCUUCAGCACCUUCACCAUUAUGG | 783 |
| 2427 | Antisense | | | |
| | Strand | | | |
| STAT3- | 27 mer | | GCUGCUACAAAGUUAGUAGUUUCAGGG | 784 |
| 2612 | Antisense | | | |
| | Strand | | | |
| STAT3- | 27 mer | | GCUGCUACCACAAAGUUAGUAGUUUGG | 785 |
| 2615 | Antisense | | | |
| | Strand | | | |
| STAT3- | 27 mer | | GCUGCUAACCACAAAGUUAGUAGUUGG | 786 |
| 2616 | Antisense | | | |
| | Strand | | | |
| STAT3- | 27 mer | | GCUGCUGAACCACAAAGUUAGUAGUGG | 787 |
| 2617 | Antisense | | | |
| | Strand | | | |
| STAT3- | 27 mer | | GCUGCUAUCUGGAACCACAAAGUUAGG | 788 |
| 2622 | Antisense | | | |
| | Strand | | | |
| STAT3- | 27 mer | | GCUGCUAAAAUCUGGAACCACAAAGGG | 789 |
| 2625 | Antisense | | | |
| | Strand | | | |
| STAT3- | 27 mer | | GCUGCUAAAAAUCUGGAACCACAAAGG | 790 |
| 2626 | Antisense | | | |
| | Strand | | | |
| STAT3- | 27 mer | | GCUGCUAAAAAAUCUGGAACCACAAGG | 791 |
| 2627 | Antisense | | | |
| | Strand | | | |
| STAT3- | 27 mer | | GCUGCUUUCACUCAUUUCUCUAUUUGG | 792 |
| 2692 | Antisense | | | |
| | Strand | | | |
| STAT3- | 27 mer | | GCUGCUAUUCACUCAUUUCUCUAUUGG | 793 |
| 2693 | Antisense | | | |
| | Strand | | | |
| STAT3- | 27 mer | | GCUGCUUAGAUAAAAGCAGAUCACCGG | 794 |
| 2715 | Antisense | | | |
| | Strand | | | |
| STAT3- | 27 mer | | GCUGCUCAUUUAGAUAAAAGCAGAUGG | 795 |
| 2719 | Antisense | | | |
| | Strand | | | |
| STAT3- | 27 mer | | GCUGCUUGCAUUUAGAUAAAAGCAGGG | 796 |
| 2721 | Antisense | | | |
| | Strand | | | |
| STAT3- | 27 mer | | GCUGCUAACACAUCCUUAUUUGCAUGG | 797 |
| 2735 | Antisense | | | |
| | Strand | | | |
| STAT3- | 27 mer | | GCUGCUUCAGAGAACACAUCCUUAUGG | 798 |
| 2741 | Antisense | | | |
| | Strand | | | |
| STAT3- | 27 mer | | GCUGCUACAAGACAUUUCCUUUUUCGG | 799 |
| 2801 | Antisense | | | |
| | Strand | | | |
| STAT3- | 27 mer | | GCUGCUACACAAGACAUUUCCUUUUGG | 800 |
| 2803 | Antisense | | | |
| | Strand | | | |
| STAT3- | 27 mer | | GCUGCUAACACAAGACAUUUCCUUUGG | 801 |
| 2804 | Antisense | | | |
| | Strand | | | |
| STAT3- | 27 mer | | GCUGCUACAACACAAGACAUUUCCUGG | 802 |
| 2806 | Antisense | | | |
| | Strand | | | |
| STAT3- | 27 mer | | GCUGCUAACAACACAAGACAUUUCCGG | 803 |
| 2807 | Antisense | | | |
| | Strand | | | |
| STAT3- | 27 mer | | GCUGCUAAACAACACAAGACAUUUCGG | 804 |
| 2808 | Antisense | | | |
| | Strand | | | |
| STAT3- | 27 mer | | GCUGCUAAAACAACACAAGACAUUUGG | 805 |
| 2809 | Antisense | | | |
| | Strand | | | |
| STAT3- | 27 mer | | GCUGCUCAAAACAACACAAGACAUUGG | 806 |
| 2810 | Antisense | | | |
| | Strand | | | |
| STAT3- | 27 mer | | GCUGCUACAAAACAACACAAGACAUGG | 807 |
| 2811 | Antisense | | | |
| | Strand | | | |
| STAT3- | 27 mer | | GCUGCUAACAAAACAACACAAGACAGG | 808 |
| 2812 | Antisense | | | |
| | Strand | | | |
| STAT3- | 27 mer | | GCUGCUGAACAAAACAACACAAGACGG | 809 |
| 2813 | Antisense | | | |
| | Strand | | | |
| STAT3- | 27 mer | | GCUGCUAUAACAAAAAGCUGCUGAGGG | 810 |
| 2846 | Antisense | | | |
| | Strand | | | |
| STAT3- | 27 mer | | GCUGCUCAAUAACAAAAAGCUGCUGGG | 811 |
| 2848 | Antisense | | | |
| | Strand | | | |
| STAT3- | 27 mer | | GCUGCUACAAUAACAAAAAGCUGCUGG | 812 |
| 2849 | Antisense | | | |
| | Strand | | | |
| STAT3- | 27 mer | | GCUGCUAACAAUAACAAAAAGCUGCGG | 813 |
| 2850 | Antisense | | | |
| | Strand | | | |
| STAT3- | 27 mer | | GCUGCUCAACAAUAACAAAAAGCUGGG | 814 |
| 2851 | Antisense | | | |
| | Strand | | | |
| STAT3- | 27 mer | | GCUGCUACAACAAUAACAAAAAGCUGG | 815 |
| 2852 | Antisense | | | |
| | Strand | | | |
| STAT3- | 27 mer | | GCUGCUAACAACAAUAACAAAAAGCGG | 816 |
| 2853 | Antisense | | | |
| | Strand | | | |
| STAT3- | 27 mer | | GCUGCUCAACAACAAUAACAAAAAGGG | 817 |
| 2854 | Antisense | | | |
| | Strand | | | |
| STAT3- | 27 mer | | GCUGCUACAACAACAAUAACAAAAAGG | 818 |
| 2855 | Antisense | | | |
| | Strand | | | |
| STAT3- | 27 mer | | GCUGCUAACAACAACAAUAACAAAAGG | 819 |
| 2856 | Antisense | | | |
| | Strand | | | |
| STAT3- | 27 mer | | GCUGCUCAACAACAACAAUAACAAAGG | 820 |
| 2857 | Antisense | | | |
| | Strand | | | |
| STAT3- | 27 mer | | GCUGCUACAACAACAACAAUAACAAGG | 821 |
| 2858 | Antisense | | | |
| | Strand | | | |
| STAT3- | 27 mer | | GCUGCUAACAACAACAACAAUAACAGG | 822 |
| 2859 | Antisense | | | |
| | Strand | | | |
| STAT3- | 27 mer | | GCUGCUGAACAACAACAACAAUAACGG | 823 |
| 2860 | Antisense | | | |
| | Strand | | | |
| STAT3- | 27 mer | | GCUGCUAGAACAACAACAACAAUAAGG | 824 |
| 2861 | Antisense | | | |
| | Strand | | | |
| STAT3- | 27 mer | | GCUGCUAAGAACAACAACAACAAUAGG | 825 |
| 2862 | Antisense | | | |
| | Strand | | | |
| STAT3- | 27 mer | | GCUGCUUAAGAACAACAACAACAAUGG | 826 |
| 2863 | Antisense | | | |
| | Strand | | | |
| STAT3- | 27 mer | | GCUGCUUCUAAGAACAACAACAACAGG | 827 |
| 2865 | Antisense | | | |
| | Strand | | | |
| STAT3- | 27 mer | | GCUGCUUGUCUAAGAACAACAACAAGG | 828 |
| 2867 | Antisense | | | |
| | Strand | | | |
| STAT3- | 27 mer | | GCUGCUUUGUCUAAGAACAACAACAGG | 829 |
| 2868 | Antisense | | | |
| | Strand | | | |
| STAT3- | 27 mer | | GCUGCUUGUCAGCAAGGUUAAAAAGGG | 830 |
| 2975 | Antisense | | | |
| | Strand | | | |
| STAT3- | 27 mer | | GCUGCUUGGAUGUCAGCAAGGUUAAGG | 831 |
| 2979 | Antisense | | | |
| | Strand | | | |
| STAT3- | 27 mer | | GCUGCUUCUAUUUGGAUGUCAGCAAGG | 832 |
| 2985 | Antisense | | | |
| | Strand | | | |
| STAT3- | 27 mer | | GCUGCUUUAAUUUAAAAAGAAACCUGG | 833 |
| 3025 | Antisense | | | |
| | Strand | | | |
| STAT3- | 27 mer | | GCUGCUUGUUAUUAUUUCUUAAUUUGG | 834 |
| 3037 | Antisense | | | |
| | Strand | | | |
| STAT3- | 27 mer | | GCUGCUUUGUUAUUAUUUCUUAAUUGG | 835 |
| 3038 | Antisense | | | |
| | Strand | | | |
| STAT3- | 27 mer | | GCUGCUAUUGUUAUUAUUUCUUAAUGG | 836 |
| 3039 | Antisense | | | |
| | Strand | | | |
| STAT3- | 27 mer | | GCUGCUUAAUUGUUAUUAUUUCUUAGG | 837 |
| 3041 | Antisense | | | |
| | Strand | | | |
| STAT3- | 27 mer | | GCUGCUUUAAUUGUUAUUAUUUCUUGG | 838 |
| 3042 | Antisense | | | |
| | Strand | | | |
| STAT3- | 27 mer | | GCUGCUUUUAAUUGUUAUUAUUUCUGG | 839 |
| 3043 | Antisense | | | |
| | Strand | | | |
| STAT3- | 27 mer | | GCUGCUAAUUUUUUGUACUUUUAGUGG | 840 |
| 3225 | Antisense | | | |
| | Strand | | | |
| STAT3- | 27 mer | | GCUGCUUAAUUUUUUGUACUUUUAGGG | 841 |
| 3226 | Antisense | | | |
| | Strand | | | |
| STAT3- | 27 mer | | GCUGCUUACAAAGGAAAAUAAGUCUGG | 842 |
| 3605 | Antisense | | | |
| | Strand | | | |
| STAT3- | 27 mer | | GCUGCUAUACAUUACAAAGGAAAAUGG | 843 |
| 3611 | Antisense | | | |
| | Strand | | | |
| STAT3- | 27 mer | | GCUGCUUCAUGUCCAACCUGUAACUGG | 844 |
| 3906 | Antisense | | | |
| | Strand | | | |
| STAT3- | 27 mer | | GCUGCUUAACAAACAGAAUUCCACAGG | 845 |
| 4311 | Antisense | | | |
| | Strand | | | |
| STAT3- | 27 mer | | GCUGCUAUUUAACAAACAGAAUUCCGG | 846 |
| 4314 | Antisense | | | |
| | Strand | | | |
| STAT3- | 27 mer | | GCUGCUUUGAUUUAACAAACAGAAUGG | 847 |
| 4317 | Antisense | | | |
| | Strand | | | |
| STAT3- | 27 mer | | GCUGCUUAAUUUGAUUUAACAAACAGG | 848 |
| 4321 | Antisense | | | |
| | Strand | | | |
| STAT3- | 27 mer | | GCUGCUUCAGUUAAGCUUAUUAUGUGG | 849 |
| 4465 | Antisense | | | |
| | Strand | | | |
| STAT3- | 27 mer | | GCUGCUAAAUAUUCUGUUUAUCAGUGG | 850 |
| 4479 | Antisense | | | |
| | Strand | | | |
| STAT3- | 27 mer | | GCUGCUUAAAUAUUCUGUUUAUCAGGG | 851 |
| 4480 | Antisense | | | |
| | Strand | | | |
| STAT3- | 27 mer | | GCUGCUAAUAUAAAUUUUUACACUAGG | 852 |
| 4831 | Antisense | | | |
| | Strand | | | |
| STAT3- | 27 mer | | GCUGCUAUAAUAUAAAUUUUUACACGG | 853 |
| 4833 | Antisense | | | |
| | Strand | | | |
| STAT3- | 27 mer | | GCUGCUACAAUAAUAUAAAUUUUUAGG | 854 |
| 4836 | Antisense | | | |
| | Strand | | | |
| STAT3- | 27 mer | | GCUGCUCACAAUAAUAUAAAUUUUUGG | 855 |
| 4837 | Antisense | | | |
| | Strand | | | |
| STAT3- | 27 mer | | GCUGCUUUUAUUUCUGGAAGUUAAAGG | 856 |
| 4909 | Antisense | | | |
| | Strand | | | |
| STAT3- | Unmodified | | CCAGGAUGACUUUGAUUUCAGCAGCCG | |
| 715 | 36 mer | | AAAGGCUGC | 857 |
| STAT3- | Unmodified | | CAGGAUGACUUUGAUUUCAAGCAGCCG | |
| 716 | 36 mer | | AAAGGCUGC | 858 |
| STAT3- | Unmodified | | AGGAUGACUUUGAUUUCAAAGCAGCCG | |
| 717 | 36 mer | | AAAGGCUGC | 859 |
| STAT3- | Unmodified | | AUGACUUUGAUUUCAACUAAGCAGCCG | |
| 720 | 36 mer | | AAAGGCUGC | 860 |
| STAT3- | Unmodified | | CUUUGGUGUUUCAUAAUCUAGCAGCCG | |
| 372 | 36 mer | | AAAGGCUGC | 861 |
| STAT3- | Unmodified | | UGACUUUGAUUUCAACUAUAGCAGCCG | |
| 721 | 36 mer | | AAAGGCUGC | 862 |
| STAT3- | Unmodified | | GACUUUGAUUUCAACUAUAAGCAGCCG | 863 |
| 722 | 36 mer | | AAAGGCUGC | |
| STAT3- | Unmodified | | AAGAUCUGAAUGGAAACAAAGCAGCCG | 864 |
| 768 | 36 mer | | AAAGGCUGC | |
| STAT3- | Unmodified | | GAAAACUGGAUAACGUCAUAGCAGCCG | 865 |
| 1001 | 36 mer | | AAAGGCUGC | |
| STAT3- | Unmodified | | CUGGAUAACGUCAUUAGCAAGCAGCCG | 866 |
| 1006 | 36 mer | | AAAGGCUGC | |
| STAT3- | Unmodified | | CUGUUUAGAAACUUAAUGAAGCAGCCG | 867 |
| 1145 | 36 mer | | AAAGGCUGC | |
| STAT3- | Unmodified | | AGAAACUUAAUGAAAAGUGAGCAGCCG | 868 |
| 1151 | 36 mer | | AAAGGCUGC | |
| STAT3- | Unmodified | | GUCAAAUUCCCUGAGUUGAAGCAGCCG | 869 |
| 1268 | 36 mer | | AAAGGCUGC | |
| STAT3- | Unmodified | | AUUCCCUGAGUUGAAUUAUAGCAGCCG | 870 |
| 1273 | 36 mer | | AAAGGCUGC | |
| STAT3- | Unmodified | | UGAGUUGAAUUAUCAGCUUAGCAGCCG | 871 |
| 1279 | 36 mer | | AAAGGCUGC | |
| STAT3- | Unmodified | | GAGUUGAAUUAUCAGCUUAAGCAGCCG | 872 |
| 1280 | 36 mer | | AAAGGCUGC | |
| STAT3- | Unmodified | | GAGUUGAAUUAUCAGCUUAAGCAGCCG | 873 |
| 1281 | 36 mer | | AAAGGCUGC | |
| STAT3- | Unmodified | | UGAAUUAUCAGCUUAAAAUAGCAGCCG | 874 |
| 1284 | 36 mer | | AAAGGCUGC | |
| STAT3- | Unmodified | | AAUUAUCAGCUUAAAAUUAAGCAGCCG | 875 |
| 1286 | 36 mer | | AAAGGCUGC | |
| STAT3- | Unmodified | | AUUAUCAGCUUAAAAUUAAAGCAGCCG | 876 |
| 1287 | 36 mer | | AAAGGCUGC | |
| STAT3- | Unmodified | | CAGCUUAAAAUUAAAGUGUAGCAGCCG | 877 |
| 1292 | 36 mer | | AAAGGCUGC | |
| STAT3- | Unmodified | | AGCUUAAAAUUAAAGUGUGAGCAGCCG | 878 |
| 1293 | 36 mer | | AAAGGCUGC | |
| STAT3- | Unmodified | | UGUGAAUUAUUCAGGGUGUAGCAGCCG | 879 |
| 1819 | 36 mer | | AAAGGCUGC | |
| STAT3- | Unmodified | | ACAAUAUCAUUGACCUUGUAGCAGCCG | 880 |
| 1908 | 36 mer | | AAAGGCUGC | |
| STAT3- | Unmodified | | AAUAUCAUUGACCUUGUGAAGCAGCCG | 881 |
| 1910 | 36 mer | | AAAGGCUGC | |
| STAT3- | Unmodified | | AUCAUUGACCUUGUGAAAAAGCAGCCG | 882 |
| 1913 | 36 mer | | AAAGGCUGC | |
| STAT3- | Unmodified | | UGUCAUUUGCUGAAAUCAUAGCAGCCG | 883 |
| 2154 | 36 mer | | AAAGGCUGC | |
| STAT3- | Unmodified | | CUGAAGACCAAGUUUAUCUAGCAGCCG | 884 |
| 2327 | 36 mer | | AAAGGCUGC | |
| STAT3- | Unmodified | | CAAGUUUAUCUGUGUGACAAGCAGCCG | 885 |
| 2335 | 36 mer | | AAAGGCUGC | |
| STAT3- | Unmodified | | AGUUUGGAAAUAAUGGUGAAGCAGCCG | 886 |
| 2418 | 36 mer | | AAAGGCUGC | |
| STAT3- | Unmodified | | AAAUAGAGAAAUGAGUGAAAGCAGCCG | 887 |
| 2692 | 36 mer | | AAAGGCUGC | |
| STAT3- | Unmodified | | AAUAGAGAAAUGAGUGAAUAGCAGCCG | 888 |
| 2693 | 36 mer | | AAAGGCUGC | |
| STAT3- | Unmodified | Hs-Mf- | UUGUGGUUCCAGAUUUUUUAGCAGCCG | 889 |
| 2627 | 36 mer | Mm | AAAGGCUGC | |
| STAT3- | Unmodified | Hs-Mf- | UUUGUGGUUCCAGAUUUUUAGCAGCCG | 890 |
| 2626 | 36 mer | Mm | AAAGGCUGC | |
| STAT3- | Unmodified | Hs-Mf- | UUCAUUGAUGCAGUUUGGAAGCAGCCG | 891 |
| 2407 | 36 mer | Mm | AAAGGCUGC | |
| STAT3- | Unmodified | Hs-Mf- | UGAUGCAGUUUGGAAAUAAAGCAGCCG | 892 |
| 2412 | 36 mer | Mm | AAAGGCUGC | |
| STAT3- | Unmodified | Hs-Mf- | ACAUGUCAUUUGCUGAAAUAGCAGCCG | 893 |
| 2151 | 36 mer | Mm | AAAGGCUGC | |
| STAT3- | Unmodified | Hs-Mf- | CUUUGUGGUUCCAGAUUUUAGCAGCCG | 894 |
| 2625 | 36 mer | Mm | AAAGGCUGC | |
| STAT3- | Unmodified | Hs-Mf- | UAAAAAUUUAUAUUAUUGUAGCAGCCG | 895 |
| 4836 | 36 mer | Mm | AAAGGCUGC | |
| STAT3- | Unmodified | Hs-Mf- | UCAUUGAUGCAGUUUGGAAAGCAGCCG | 896 |
| 2408 | 36 mer | Mm | AAAGGCUGC | |
| STAT3- | Unmodified | Hs-Mf- | UUUGCUGAAAUCAUCAUGGAGCAGCCG | 897 |
| 2159 | 36 mer | Mm | AAAGGCUGC | |
| STAT3- | Unmodified | Hs-Mf- | GAACAACAUGUCAUUUGCUAGCAGCCG | 898 |
| 2146 | 36 mer | Mm | AAAGGCUGC | |
| STAT3- | Unmodified | Hs-Mf- | ACAACAUGUCAUUUGCUGAAGCAGCCG | 899 |
| 2148 | 36 mer | Mm | AAAGGCUGC | |
| STAT3- | Unmodified | Hs-Mf- | AACAACAUGUCAUUUGCUGAGCAGCCG | 900 |
| 2147 | 36 mer | Mm | AAAGGCUGC | |
| STAT3- | Unmodified | Hs-Mf- | CGAAGAAUCAAGCAGUUUCAGCAGCCG | 901 |
| 0461 | 36 mer | Mm | AAAGGCUGC | |
| STAT3- | Unmodified | Hs-Mf- | CCUUGCCAGUUGUGGUGAUAGCAGCCG | 902 |
| 1584 | 36 mer | Mm | AAAGGCUGC | |
| STAT3- | Unmodified | Hs-Mf- | AACAAAUUAAGAAACUGGAAGCAGCCG | 903 |
| 1047 | 36 mer | Mm | AAAGGCUGC | |
| STAT3- | Unmodified | Hs-Mf- | CUGAAUGGAAACAACCAGUAGCAGCCG | 904 |
| 0773 | 36 mer | Mm | AAAGGCUGC | |
| STAT3- | Unmodified | Hs-Mf- | AUCUUGAGAAGCCAAUGGAAGCAGCCG | 905 |
| 0492 | 36 mer | Mm | AAAGGCUGC | |
| STAT3- | Unmodified | Hs-Mf- | GAAGAAUCAAGCAGUUUCUAGCAGCCG | 906 |
| 0462 | 36 mer | Mm | AAAGGCUGC | |
| STAT3- | Unmodified | Hs-Mf- | UUGCCAGUUGUGGUGAUCUAGCAGCCG | 907 |
| 1586 | 36 mer | Mm | AAAGGCUGC | |
| STAT3- | Unmodified | Hs-Mf- | AUCUGAAUGGAAACAACCAAGCAGCCG | 908 |
| 0771 | 36 mer | Mm | AAAGGCUGC | |
| STAT3- | Unmodified | Hs-Mf- | AUCUAGAACAGAAAAUGAAAGCAGCCG | 909 |
| 0681 | 36 mer | Mm | AAAGGCUGC | |
| STAT3- | Unmodified | Hs-Mf- | AGGAUCUAGAACAGAAAAUAGCAGCCG | 910 |
| 0678 | 36 mer | Mm | AAAGGCUGC | |
| STAT3- | Unmodified | Hs-Mf- | AAAAAUUUAUAUUAUUGUGAGCAGCCG | 911 |
| 4837 | 36 mer | Mm | AAAGGCUGC | |
| STAT3- | Unmodified | Hs-Mf- | GUGUAAAAAUUUAUAUUAUAGCAGCCG | 912 |
| 4833 | 36 mer | Mm | AAAGGCUGC | |
| STAT3- | Unmodified | Hs | AGUUGCAGCAAAAAGUUUCAGCAGCCG | 913 |
| 1068 | 36 mer | | AAAGGCUGC | |
| STAT3- | Unmodified | Hs | AAGAAUGUAAACUUUUUUAAGCAGCCG | 914 |
| 1673 | 36 mer | | AAAGGCUGC | |
| STAT3- | Unmodified | Hs | UGCAAGAGUCGAAUGUUCUAGCAGCCG | 915 |
| 0426 | 36 mer | | AAAGGCUGC | |
| STAT3- | Unmodified | Hs | AGAUUCAUUGAUGCAGUUUAGCAGCCG | 916 |
| 2404 | 36 mer | | AAAGGCUGC | |
| STAT3- | Unmodified | Hs | GAGUUGCAGCAAAAAGUUUAGCAGCCG | 917 |
| 1067 | 36 mer | | AAAGGCUGC | |
| STAT3- | Unmodified | Hs | GUCGAAUGUUCUCUAUCAGAGCAGCCG | 918 |
| 0433 | 36 mer | | AAAGGCUGC | |
| STAT3- | Unmodified | Hs | CCCAAGAAUGUAAACUUUUAGCAGCCG | 919 |
| 1670 | 36 mer | | AAAGGCUGC | |
| STAT3- | Unmodified | Hs | GUGAUGAACAUGGAAGAAUAGCAGCCG | 920 |
| 1388 | 36 mer | | AAAGGCUGC | |
| STAT3- | Unmodified | Hs | AAGAGUCGAAUGUUCUCUAAGCAGCCG | 921 |
| 0429 | 36 mer | | AAAGGCUGC | |
| STAT3- | Unmodified | Hs | GAUUCAUUGAUGCAGUUUGAGCAGCCG | 922 |
| 2405 | 36 mer | | AAAGGCUGC | |
| STAT3- | Unmodified | Hs | AGAGUCGAAUGUUCUCUAUAGCAGCCG | 923 |
| 0430 | 36 mer | | AAAGGCUGC | |
| STAT3- | Unmodified | Hs | AGUCGAAUGUUCUCUAUCAAGCAGCCG | 924 |
| 0432 | 36 mer | | AAAGGCUGC | |
| STAT3- | Unmodified | Hs | CUGGUGUGAAUUAUUCAGGAGCAGCCG | 925 |
| 1815 | 36 mer | | AAAGGCUGC | |
| STAT3- | Unmodified | Hs | CCUGCAAGAGUCGAAUGUUAGCAGCCG | 926 |
| 0424 | 36 mer | | AAAGGCUGC | |
| STAT3- | Unmodified | Hs | ACCUUCCUGCUAAGAUUCAAGCAGCCGA | 927 |
| 2024 | 36 mer | | AAGGCUGC | |
| STAT3- | Unmodified | Hs | ACCUGGUGUGAAUUAUUCAAGCAGCCG | 928 |
| 1813 | 36 mer | | AAAGGCUGC | |
| STAT3- | Unmodified | Hs | AGAAUGUAAACUUUUUUACAGCAGCCG | 929 |
| 1674 | 36 mer | | AAAGGCUGC | |
| STAT3- | Unmodified | Hs | CAGUUCACUACUAAAGUCAAGCAGCCG | 930 |
| 1241 | 36 mer | | AAAGGCUGC | |
| STAT3- | Unmodified | Hs | CAAGAAUGUAAACUUUUUUAGCAGCCG | 931 |
| 1672 | 36 mer | | AAAGGCUGC | |
| STAT3- | Unmodified | Hs | CUGCAAGAGUCGAAUGUUCAGCAGCCG | 932 |
| 0425 | 36 mer | | AAAGGCUGC | |
| STAT3- | Unmodified | Hs | GGUGUGAAUUAUUCAGGGUAGCAGCCG | 933 |
| 1817 | 36 mer | | AAAGGCUGC | |
| STAT3- | Unmodified | Hs | CCAAGAAUGUAAACUUUUUAGCAGCCG | 934 |
| 1671 | 36 mer | | AAAGGCUGC | |
| STAT3- | Unmodified | Hs-Mm | AGCAGCAGCUGAACAACAUAGCAGCCG | 935 |
| 2136 | 36 mer | | AAAGGCUGC | |
| STAT3- | Unmodified | Hs-Mm | GCUGAACAACAUGUCAUUUAGCAGCCG | 936 |
| 2143 | 36 mer | | AAAGGCUGC | |
| STAT3- | Unmodified | Hs-Mm | CUGAACAACAUGUCAUUUGAGCAGCCG | 937 |
| 2144 | 36 mer | | AAAGGCUGC | |
| STAT3- | Unmodified | Hs-Mm | CAGCAGCUGAACAACAUGUAGCAGCCG | 938 |
| 2138 | 36 mer | | AAAGGCUGC | |
| STAT3- | Unmodified | Hs-Mm | UUUAACUUCCAGAAAUAAAAGCAGCCG | 939 |
| 4909 | 36 mer | | AAAGGCUGC | |
| STAT3- | Unmodified | Hs-Mm | AGCAGCUGAACAACAUGUCAGCAGCCG | 940 |
| 2139 | 36 mer | | AAAGGCUGC | |
| STAT3- | Unmodified | Hs-Mm | UUGAUGCAGUUUGGAAAUAAGCAGCCG | 941 |
| 2411 | 36 mer | | AAAGGCUGC | |
| STAT3- | Unmodified | Hs-Mm | UGAACAACAUGUCAUUUGCAGCAGCCG | 942 |
| 2145 | 36 mer | | AAAGGCUGC | |
| STAT3- | Unmodified | Hs-Mm | UAGUGUAAAAAUUUAUAUUAGCAGCCG | 943 |
| 4831 | 36 mer | | AAAGGCUGC | |
| STAT3- | Unmodified | Hs-Mm | UAACUUUGUGGUUCCAGAUAGCAGCCG | 944 |
| 2622 | 36 mer | | AAAGGCUGC | |
| STAT3- | Unmodified | Hs-Mm | AAGCAGCAGCUGAACAACAAGCAGCCG | 945 |
| 2135 | 36 mer | | AAAGGCUGC | |
| STAT3- | Unmodified | Hs-Mm | CAAAAGUGAUGAACAUGGAAGCAGCCG | 946 |
| 1383 | 36 mer | | AAAGGCUGC | |
| STAT3- | Unmodified | | UGAAAUCAAAGUCAUCCUGGGG | 947 |
| 715 | 22 mer | | | |
| STAT3- | Unmodified | | UUGAAAUCAAAGUCAUCCUGGG | 948 |
| 716 | 22 mer | | | |
| STAT3- | Unmodified | | UUUGAAAUCAAAGUCAUCCUGG | 949 |
| 717 | 22 mer | | | |
| STAT3- | Unmodified | | UUAGUUGAAAUCAAAGUCAUGG | 950 |
| 720 | 22 mer | | | |
| STAT3- | Unmodified | | UAGAUUAUGAAACACCAAAGGG | 951 |
| 372 | 22 mer | | | |
| STAT3- | Unmodified | | UAUAGUUGAAAUCAAAGUCAGG | 952 |
| 721 | 22 mer | | | |
| STAT3- | Unmodified | | UUAUAGUUGAAAUCAAAGUCGG | 953 |
| 722 | 22 mer | | | |
| STAT3- | Unmodified | | UUUGUUUCCAUUCAGAUCUUGG | 954 |
| 768 | 22 mer | | | |
| STAT3- | Unmodified | | UAUGACGUUAUCCAGUUUUCGG | 955 |
| 1001 | 22 mer | | | |
| STAT3- | Unmodified | | UUGCUAAUGACGUUAUCCAGGG | 956 |
| 1006 | 22 mer | | | |
| STAT3- | Unmodified | | UUCAUUAAGUUUCUAAACAGGG | 957 |
| 1145 | 22 mer | | | |
| STAT3- | Unmodified | | UCACUUUUCAUUAAGUUUCUGG | 958 |
| 1151 | 22 mer | | | |
| STAT3- | Unmodified | | UUCAACUCAGGGAAUUUGACGG | 959 |
| 1268 | 22 mer | | | |
| STAT3- | Unmodified | | UAUAAUUCAACUCAGGGAAUGG | 960 |
| 1273 | 22 mer | | | |
| STAT3- | Unmodified | | UAAGCUGAUAAUUCAACUCAGG | 961 |
| 1279 | 22 mer | | | |
| STAT3- | Unmodified | | UUAAGCUGAUAAUUCAACUCGG | 962 |
| 1280 | 22 mer | | | |
| STAT3- | Unmodified | | UUUAAGCUGAUAAUUCAACUGG | 963 |
| 1281 | 22 mer | | | |
| STAT3- | Unmodified | | UAUUUUAAGCUGAUAAUUCAGG | 964 |
| 1284 | 22 mer | | | |
| STAT3- | Unmodified | | UUAAUUUUAAGCUGAUAAUUGG | 965 |
| 1286 | 22 mer | | | |
| STAT3- | Unmodified | | UUUAAUUUUAAGCUGAUAAUGG | 966 |
| 1287 | 22 mer | | | |
| STAT3- | Unmodified | | UACACUUUAAUUUUAAGCUGGG | 967 |
| 1292 | 22 mer | | | |
| STAT3- | Unmodified | | UCACACUUUAAUUUUAAGCUGG | 968 |
| 1293 | 22 mer | | | |
| STAT3- | Unmodified | | UACACCCUGAAUAAUUCACAGG | 969 |
| 1819 | 22 mer | | | |
| STAT3- | Unmodified | | UACAAGGUCAAUGAUAUUGUGG | 970 |
| 1908 | 22 mer | | | |
| STAT3- | Unmodified | | UUCACAAGGUCAAUGAUAUUGG | 971 |
| 1910 | 22 mer | | | |
| STAT3- | Unmodified | | UUUUUCACAAGGUCAAUGAUGG | 972 |
| 1913 | 22 mer | | | |
| STAT3- | Unmodified | | UAUGAUUUCAGCAAAUGACAGG | 973 |
| 2154 | 22 mer | | | |
| STAT3- | Unmodified | | UAGAUAAACUUGGUCUUCAGGG | 974 |
| 2327 | 22 mer | | | |
| STAT3- | Unmodified | | UUGUCACACAGAUAAACUUGGG | 975 |
| 2335 | 22 mer | | | |
| STAT3- | Unmodified | | UUCACCAUUAUUUCCAAACUGG | 976 |
| 2418 | 22 mer | | | |
| STAT3- | Unmodified | | UUUCACUCAUUUCUCUAUUUGG | 977 |
| 2692 | 22 mer | | | |
| STAT3- | Unmodified | | UAUUCACUCAUUUCUCUAUUGG | 978 |
| 2693 | 22 mer | | | |
| STAT3- | Unmodified | Hs-Mf- | UAAAAAAUCUGGAACCACAAGG | 979 |
| 2627 | 22 mer | Mm | | |
| STAT3- | Unmodified | Hs-Mf- | UAAAAAUCUGGAACCACAAAGG | 980 |
| 2626 | 22 mer | Mm | | |
| STAT3- | Unmodified | Hs-Mf- | UUCCAAACUGCAUCAAUGAAGG | 981 |
| 2407 | 22 mer | Mm | | |
| STAT3- | Unmodified | Hs-Mf- | UUUAUUUCCAAACUGCAUCAGG | 982 |
| 2412 | 22 mer | Mm | | |
| STAT3- | Unmodified | Hs-Mf- | UAUUUCAGCAAAUGACAUGUGG | 983 |
| 2151 | 22 mer | Mm | | |
| STAT3- | Unmodified | Hs-Mf- | UAAAAUCUGGAACCACAAAGGG | 984 |
| 2625 | 22 mer | Mm | | |
| STAT3- | Unmodified | Hs-Mf- | UACAAUAAUAUAAAUUUUUAGG | 985 |
| 4836 | 22 mer | Mm | | |
| STAT3- | Unmodified | Hs-Mf- | UUUCCAAACUGCAUCAAUGAGG | 986 |
| 2408 | 22 mer | Mm | | |
| STAT3- | Unmodified | Hs-Mf- | UCCAUGAUGAUUUCAGCAAAGG | 987 |
| 2159 | 22 mer | Mm | | |
| STAT3- | Unmodified | Hs-Mf- | UAGCAAAUGACAUGUUGUUCGG | 988 |
| 2146 | 22 mer | Mm | | |
| STAT3- | Unmodified | Hs-Mf- | UUCAGCAAAUGACAUGUUGUGG | 989 |
| 2148 | 22 mer | Mm | | |
| STAT3- | Unmodified | Hs-Mf- | UCAGCAAAUGACAUGUUGUUGG | 990 |
| 2147 | 22 mer | Mm | | |
| STAT3- | Unmodified | Hs-Mf- | UGAAACUGCUUGAUUCUUCGGG | 991 |
| 0461 | 22 mer | Mm | | |
| STAT3- | Unmodified | Hs-Mf- | UAUCACCACAACUGGCAAGGGG | 992 |
| 1584 | 22 mer | Mm | | |
| STAT3- | Unmodified | Hs-Mf- | UUCCAGUUUCUUAAUUUGUUGG | 993 |
| 1047 | 22 mer | Mm | | |
| STAT3- | Unmodified | Hs-Mf- | UACUGGUUGUUUCCAUUCAGGG | 994 |
| 0773 | 22 mer | Mm | | |
| STAT3- | Unmodified | Hs-Mf- | UUCCAUUGGCUUCUCAAGAUGG | 995 |
| 0492 | 22 mer | Mm | | |
| STAT3- | Unmodified | Hs-Mf- | UAGAAACUGCUUGAUUCUUCGG | 996 |
| 0462 | 22 mer | Mm | | |
| STAT3- | Unmodified | Hs-Mf- | UAGAUCACCACAACUGGCAAGG | 997 |
| 1586 | 22 mer | Mm | | |
| STAT3- | Unmodified | Hs-Mf- | UUGGUUGUUUCCAUUCAGAUGG | 998 |
| 0771 | 22 mer | Mm | | |
| STAT3- | Unmodified | Hs-Mf- | UUUCAUUUUCUGUUCUAGAUGG | 999 |
| 0681 | 22 mer | Mm | | |
| STAT3- | Unmodified | Hs-Mf- | UAUUUUCUGUUCUAGAUCCUGG | 1000 |
| 0678 | 22 mer | Mm | | |
| STAT3- | Unmodified | Hs-Mf- | UCACAAUAAUAUAAAUUUUUGG | 1001 |
| 4837 | 22 mer | Mm | | |
| STAT3- | Unmodified | Hs-Mf- | UAUAAUAUAAAUUUUUACACGG | 1002 |
| 4833 | 22 mer | Mm | | |
| STAT3- | Unmodified | Hs | UGAAACUUUUUGCUGCAACUGG | 1003 |
| 1068 | 22 mer | | | |
| STAT3- | Unmodified | Hs | UUAAAAAAGUUUACAUUCUUGG | 1004 |
| 1673 | 22 mer | | | |
| STAT3- | Unmodified | Hs | UAGAACAUUCGACUCUUGCAGG | 1005 |
| 0426 | 22 mer | | | |
| STAT3- | Unmodified | Hs | UAAACUGCAUCAAUGAAUCUGG | 1006 |
| 2404 | 22 mer | | | |
| STAT3- | Unmodified | Hs | UAAACUUUUUGCUGCAACUCGG | 1007 |
| 1067 | 22 mer | | | |
| STAT3- | Unmodified | Hs | UCUGAUAGAGAACAUUCGACGG | 1008 |
| 0433 | 22 mer | | | |
| STAT3- | Unmodified | Hs | UAAAAGUUUACAUUCUUGGGGG | 1009 |
| 1670 | 22 mer | | | |
| STAT3- | Unmodified | Hs | UAUUCUUCCAUGUUCAUCACGG | 1010 |
| 1388 | 22 mer | | | |
| STAT3- | Unmodified | Hs | UUAGAGAACAUUCGACUCUUGG | 1011 |
| 0429 | 22 mer | | | |
| STAT3- | Unmodified | Hs | UCAAACUGCAUCAAUGAAUCGG | 1012 |
| 2405 | 22 mer | | | |
| STAT3- | Unmodified | Hs | UAUAGAGAACAUUCGACUCUGG | 1013 |
| 0430 | 22 mer | | | |
| STAT3- | Unmodified | Hs | UUGAUAGAGAACAUUCGACUGG | 1014 |
| 0432 | 22 mer | | | |
| STAT3- | Unmodified | Hs | UCCUGAAUAAUUCACACCAGGG | 1015 |
| 1815 | 22 mer | | | |
| STAT3- | Unmodified | Hs | UAACAUUCGACUCUUGCAGGGG | 1016 |
| 0424 | 22 mer | | | |
| STAT3- | Unmodified | Hs | UUGAAUCUUAGCAGGAAGGUGG | 1017 |
| 2024 | 22 mer | | | |
| STAT3- | Unmodified | Hs | UUGAAUAAUUCACACCAGGUGG | 1018 |
| 1813 | 22 mer | | | |
| STAT3- | Unmodified | Hs | UGUAAAAAAGUUUACAUUCUGG | 1019 |
| 1674 | 22 mer | | | |
| STAT3- | Unmodified | Hs | UUGACUUUAGUAGUGAACUGGG | 1020 |
| 1241 | 22 mer | | | |
| STAT3- | Unmodified | Hs | UAAAAAAGUUUACAUUCUUGGG | 1021 |
| 1672 | 22 mer | | | |
| STAT3- | Unmodified | Hs | UGAACAUUCGACUCUUGCAGGG | 1022 |
| 0425 | 22 mer | | | |
| STAT3- | Unmodified | Hs | UACCCUGAAUAAUUCACACCGG | 1023 |
| 1817 | 22 mer | | | |
| STAT3- | Unmodified | Hs | UAAAAAGUUUACAUUCUUGGGG | 1024 |
| 1671 | 22 mer | | | |
| STAT3- | Unmodified | Hs-Mm | UAUGUUGUUCAGCUGCUGCUGG | 1025 |
| 2136 | 22 mer | | | |
| STAT3- | Unmodified | Hs-Mm | UAAAUGACAUGUUGUUCAGCGG | 1026 |
| 2143 | 22 mer | | | |
| STAT3- | Unmodified | Hs-Mm | UCAAAUGACAUGUUGUUCAGGG | 1027 |
| 2144 | 22 mer | | | |
| STAT3- | Unmodified | Hs-Mm | UACAUGUUGUUCAGCUGCUGGG | 1028 |
| 2138 | 22 mer | | | |
| STAT3- | Unmodified | Hs-Mm | UUUUAUUUCUGGAAGUUAAAGG | 1029 |
| 4909 | 22 mer | | | |
| STAT3- | Unmodified | Hs-Mm | UGACAUGUUGUUCAGCUGCUGG | 1030 |
| 2139 | 22 mer | | | |
| STAT3- | Unmodified | Hs-Mm | UUAUUUCCAAACUGCAUCAAGG | 1031 |
| 2411 | 22 mer | | | |
| STAT3- | Unmodified | Hs-Mm | UGCAAAUGACAUGUUGUUCAGG | 1032 |
| 2145 | 22 mer | | | |
| STAT3- | Unmodified | Hs-Mm | UAAUAUAAAUUUUUACACUAGG | 1033 |
| 4831 | 22 mer | | | |
| STAT3- | Unmodified | Hs-Mm | UAUCUGGAACCACAAAGUUAGG | 1034 |
| 2622 | 22 mer | | | |
| STAT3- | Unmodified | Hs-Mm | UUGUUGUUCAGCUGCUGCUUGG | 1035 |
| 2135 | 22 mer | | | |
| STAT3- | Unmodified | Hs-Mm | UUCCAUGUUCAUCACUUUUGGG | 1036 |
| 1383 | 22 mer | | | |
| STAT3- | Modified 36 | | [mCs][mC][mA][mG][mG][mA][mU][fG][fA][fC] | 1037 |
| 715 | mer | | [fU][mU][mU][mG][mA][mU][mU][mU][mC] | |
| | | | [mA][mG][mC][mA][mG][mC][mC][mG][ademA- | |
| | | | GalNAc][ademA-GalNAc][ademA- | |
| | | | GalNAc][mG][mG][mC][mU][mG][mC] | |
| STAT3- | Modified 36 | | [mCs][mA][mG][mG][mA][mU][mG][fA][fC][fU] | 1038 |
| 716 | mer | | [fU][mU][mG][mA][mU][mU][mU][mC][mA] | |
| | | | [mA][mG][mC][mA][mG][mC][mC][mG][ademA- | |
| | | | GalNAc][ademA-GalNAc][ademA- | |
| | | | GalNAc][mG][mG][mC][mU][mG][mC] | |
| STAT3- | Modified 36 | | [mAs][mG][mG][mA][mU][mG][mA][fC][fU][fU] | 1039 |
| 717 | mer | | [fU][mG][mA][mU][mU][mU][mC][mA][mA] | |
| | | | [mA][mG][mC][ma][mG][mC][mC][mG][ademA- | |
| | | | GalNAc][ademA-GalNAc][ademA- | |
| | | | GalNAc][mG][mG][mC][mU][mG][mC] | |
| STAT3- | Modified 36 | | [mAs][mU][mG][mA][mC][mU][mU][fU][fG][fA] | 1040 |
| 720 | mer | | [fU][mU][mU][mC][mA][mA][mC][mU][mA] | |
| | | | [mA][mG][mC][mA][mG][mC][mC][mG][ademA- | |
| | | | GalNAc][ademA-GalNAc][ademA- | |
| | | | GalNAc][mG][mG][mC][mU][mG][mC] | |
| STAT3- | Modified 36 | | [mCs][mU][mU][mU][mG][mG][mU][fG][fU][fU] | 1041 |
| 372 | mer | | [fU][mC][mA][mU][mA][mA][mU][mC][mU] | |
| | | | [mA][mG][mC][mA][mG][mC][mC][mG][ademA- | |
| | | | GalNAc][ademA-GalNAc][ademA- | |
| | | | GalNAc][mG][mG][mC][mU][mG][mC] | |
| STAT3- | Modified 36 | | [mUs][mG][mA][mC][mU][mU][mU][fG][fA][fU] | 1042 |
| 721 | mer | | [fU][mU][mC][mA][mA][mC][mU][mA][mU] | |
| | | | [mA][mG][mC][mA][mG][mC][mC][mG][ademA- | |
| | | | GalNAc][ademA-GalNAc][ademA- | |
| | | | GalNAc][mG][mG][mC][mU][mG][mC] | |
| STAT3- | Modified 36 | | [mGs][mA][mC][mU][mU][mU][mG][fA][fU][fU] | 1043 |
| 722 | mer | | [fU][mC][mA][mA][mC][mU][mA][mU][mA] | |
| | | | [mA][mG][mC][mA][mG][mC][mC][mG][ademA- | |
| | | | GalNAc][ademA-GalNAc][ademA- | |
| | | | GalNAc][mG][mG][mC][mU][mG][mC] | |
| STAT3- | Modified 36 | | [mAs][mA][mG][mA][mU][mC][mU][fG][fA][fA] | 1044 |
| 768 | mer | | [fU][mG][mG][mA][mA][mA][mC][mA][mA] | |
| | | | [mA][mG][mC][mA][mG][mC][mC][mG][ademA- | |
| | | | GalNAc][ademA-GalNAc][ademA- | |
| | | | GalNAc][mG][mG][mC][mU][mG][mC] | |
| STAT3- | Modified 36 | | [mGs][mA][mA][mA][mA][mC][mU][fG][fG][fA] | 1045 |
| 1001 | mer | | [fU][mA][mA][mC][mG][mU][mC][mA][mU] | |
| | | | [mA][mG][mC][mA][mG][mC][mC][mG][ademA- | |
| | | | GalNAc][ademA-GalNAc][ademA- | |
| | | | GalNAc][mG][mG][mC][mU][mG][mC] | |
| STAT3- | Modified 36 | | [mCs][mU][mG][mG][mA][mU][mA][fA][fC][fG] | 1046 |
| 1006 | mer | | [fU][mC][mA][mU][mU][mA][mG][mC][mA] | |
| | | | [mA][mG][mC][mA][mG][mC][mC][mG][ademA- | |
| | | | GalNAc][ademA-GalNAc][ademA- | |
| | | | GalNAc][mG][mG][mC][mU][mG][mC] | |
| STAT3- | Modified 36 | | [mCs][mU][mG][mU][mU][mU][mA][fG][fA][fA] | 1047 |
| 1145 | mer | | [fA][mC][mU][mU][mA][mA][mU][mG][mA] | |
| | | | [mA][mG][mC][mA][mG][mC][mC][mG][ademA- | |
| | | | GalNAc][ademA-GalNAc][ademA- | |
| | | | GalNAc][mG][mG][mC][mU][mG][mC] | |
| STAT3- | Modified 36 | | [mAs][mG][mA][mA][mA][mC][mU][fU][fA][fA] | 1048 |
| 1151 | mer | | [fU][mG][mA][mA][mA][mA][mG][mU][mG] | |
| | | | [mA][mG][mC][mA][mG][mC][mC][mG][ademA- | |
| | | | GalNAc][ademA-GalNAc][ademA- | |
| | | | GalNAc][mG][mG][mC][mU][mG][mC] | |
| STAT3- | Modified 36 | | [mGs][mU][mC][mA][mA][mA][mU][fU][fC][fC] | 1049 |
| 1268 | mer | | [fC][mU][mG][mA][mG][mU][mU][mG][mA] | |
| | | | [mA][mG][mC][mA][mG][mC][mC][mG][ademA- | |
| | | | GalNAc][ademA-GalNAc][ademA- | |
| | | | GalNAc][mG][mG][mC][mU][mG][mC] | |
| STAT3- | Modified 36 | | [mAs][mU][mU][mC][mC][mC][mU][fG][fA][fG] | 1050 |
| 1273 | mer | | [fU][mU][mG][mA][mA][mU][mU][mA][mU] | |
| | | | [mA][mG][mC][mA][mG][mC][mC][mG][ademA- | |
| | | | -GalNAc][ademA-GalNAc][ademA- | |
| | | | GalNAc][mG][mG][mC][mU][mG][mC] | |
| STAT3- | Modified 36 | | [mUs][mG][mA][mG][mU][mU][mG][fA][fA][fU] | 1051 |
| 1279 | mer | | [fU][mA][mU][mC][mA][mG][mC][mU][mU] | |
| | | | [mA][mG][mC][mA][mG][mC][mC][mG][ademA- | |
| | | | GalNAc][ademA-GalNAc][ademA- | |
| | | | GalNAc][mG][mG][mC][mU][mG][mC] | |
| STAT3- | Modified 36 | | [mGs][mA][mG][mU][mU][mG][mA][fA][fU][fU] | 1052 |
| 1280 | mer | | [fA][mU][mC][mA][mG][mC][mU][mU][mA] | |
| | | | [mA][mG][mC][mA][mG][mC][mC][mG][ademA- | |
| | | | GalNAc][ademA-GalNAc][ademA- | |
| | | | GalNAc][mG][mG][mC][mU][mG][mC] | |
| STAT3- | Modified 36 | | [mAs][mG][mU][mU][mG][mA][mA][fU][fU][fA] | 1053 |
| 1281 | mer | | [fU][mC][mA][mG][mC][mU][mU][mA][mA] | |
| | | | [mA][mG][mC][mA][mG][mC][mC][mG][ademA- | |
| | | | GalNAc][ademA-GalNAc][ademA- | |
| | | | GalNAc][mG][mG][mC][mU][mG][mC] | |
| STAT3- | Modified 36 | | [mUs][mG][mA][mA][mU][mU][mA][fU][fC][fA] | 1054 |
| 1284 | mer | | [fG][mC][mU][mU][mA][mA][mA][mA][mU] | |
| | | | [mA][mG][mC][mA][mG][mC][mC][mG][ademA- | |
| | | | GalNAc][ademA-GalNAc][ademA- | |
| | | | GalNAc][mG][mG][mC][mU][mG][mC] | |
| STAT3- | Modified 36 | | [mAs][mA][mU][mU][mA][mU][mC][A][fG][fC] | 1055 |
| 1286 | mer | | [fU][mU][mA][mA][mA][mA][mU][mU][mA] | |
| | | | [mA][mG][mC][mA][mG][mC][mC][mG][ademA- | |
| | | | GalNAc][ademA-GalNAc][ademA- | |
| | | | GalNAc][mG][mG][mC][mU][mG][mC] | |
| STAT3- | Modified 36 | | [mAs][mU][mU][mA][mU][mC][mA][fG][fC][fU] | 1056 |
| 1287 | mer | | [fU][mA][mA][mA][mA][mU][mU][mA][mA] | |
| | | | [mA][mG][mC][mA][mG][mC][mC][mG][ademA- | |
| | | | GalNAc][ademA-GalNAc][ademA- | |
| | | | GalNAc][mG][mG][mC][mU][mG][mC] | |
| STAT3- | Modified 36 | | [mCs][mA][mG][mC][mU][mU][mA][fA][fA][fA] | 1057 |
| 1292 | mer | | [fU][mU][mA][mA][mA][mG][mU][mG][mU] | |
| | | | [mA][mG][mC][mA][mG][mC][mC][mG][ademA- | |
| | | | GalNAc][ademA-GalNAc][ademA- | |
| | | | GalNAc][mG][mG][mC][mU][mG][mC] | |
| STAT3- | Modified 36 | | [mAs][mG][mC][mU][mU][mA][mA][fA][fA][fU] | 1058 |
| 1293 | mer | | [fU][mA][mA][mA][mG][mU][mG][mU][mG] | |
| | | | [mA][mG][mC][mA][mG][mC][mC][mG][ademA- | |
| | | | GalNAc][ademA-GalNAc][ademA- | |
| | | | GalNAc][mG][mG][mC][mU][mG][mC] | |
| STAT3- | Modified 36 | | [mUs][mG][mU][mG][mA][mA][mU][fU][fA][fU] | 1059 |
| 1819 | mer | | [fU][mC][mA][mG][mG][mG][mU][mG][mU] | |
| | | | [mA][mG][mC][mA][mG][mC][mC][mG][ademA- | |
| | | | GalNAc][ademA-GalNAc][ademA- | |
| | | | GalNAc][mG][mG][mC][mU][mG][mC] | |
| STAT3- | Modified 36 | | [mAs][mC][mA][mA][mU][mA][mU][fC][fA][fU] | 1060 |
| 1908 | mer | | [fU][mG][mA][mC][mC][mU][mU][mG][mU] | |
| | | | [mA][mG][mC][mA][mG][mC][mC][mG][ademA- | |
| | | | GalNAc][ademA-GalNAc][ademA- | |
| | | | GalNAc][mG][mG][mC][mU][mG][mC] | |
| STAT3- | Modified 36 | | [mAs][mA][mU][mA][mU][mC][mA][fU][fU][fG] | 1061 |
| 1910 | mer | | [fA][mC][mC][mU][mU][mG][mU][mG][mA] | |
| | | | [mA][mG][mC][mA][mG][mC][mC][mG][ademA- | |
| | | | GalNAc][ademA-GalNAc][ademA- | |
| | | | GalNAc][mG][mG][mC][mU][mG][mC] | |
| STAT3- | Modified 36 | | [mAs][mU][mC][mA][mU][mU][mG][fA][fC][fC] | 1062 |
| 1913 | mer | | [fU][mU][mG][mU][mG][mA][mA][mA][mA] | |
| | | | [mA][mG][mC][mA][mG][mC][mC][mG][ademA- | |
| | | | GalNAc][ademA-GalNAc][ademA- | |
| | | | GalNAc][mG][mG][mC][mU][mG][mC] | |
| STAT3- | Modified 36 | | [mUs][mG][mU][mC][mA][mU][mU][fU][fG][fC] | 1063 |
| 2154 | mer | | [fU][mG][mA][mA][mA][mU][mC][mA][mU] | |
| | | | [mA][mG][mC][mA][mG][mC][mC][mG][ademA- | |
| | | | GalNAc][ademA-GalNAc][ademA- | |
| | | | GalNAc][mG][mG][mC][mU][mG][mC] | |
| STAT3- | Modified 36 | | [mCs][mU][mG][mA][mA][mG][mA][fC][fC][fA] | 1064 |
| 2327 | mer | | [fA][mG][mU][mU][mU][mA][mU][mC][mU] | |
| | | | [mA][mG][mC][mA][mG][mC][mC][mG][ademA- | |
| | | | GalNAc][ademA-GalNAc][ademA- | |
| | | | GalNAc][mG][mG][mC][mU][mG][mC] | |
| STAT3- | Modified 36 | | [mCs][mA][mA][mG][mU][mU][mU][fA][fU][fC] | 1065 |
| 2335 | mer | | [fU][mG][mU][mG][mU][mG][mA][mC][mA] | |
| | | | [mA][mG][mC][mA][mG][mC][mC][mG][ademA- | |
| | | | GalNAc][ademA-GalNAc][ademA- | |
| | | | GalNAc][mG][mG][mC][mU][mG][mC] | |
| STAT3- | Modified 36 | | [mAs][mG][mU][mU][mU][mG][mG][fA][fA][fA] | 1066 |
| 2418 | mer | | [fU][mA][mA][mU][mG][mG][mU][mG][mA] | |
| | | | [mA][mG][mC][mA][mG][mC][mC][mG][ademA- | |
| | | | GalNAc][ademA-GalNAc][ademA- | |
| | | | GalNAc][mG][mG][mC][mU][mG][mC] | |
| STAT3- | Modified 36 | | [mAs][mA][mA][mU][mA][mG][mA][fG][fA][fA] | 1067 |
| 2692 | mer | | [fA][mU][mG][mA][mG][mU][mG][mA][mA] | |
| | | | [mA][mG][mC][mA][mG][mC][mC][mG][ademA- | |
| | | | GalNAc][ademA-GalNAc][ademA- | |
| | | | GalNAc][mG][mG][mC][mU][mG][mC] | |
| STAT3- | Modified 36 | | [mAs][mA][mU][mA][mG][mA][mG][fA][fA][fA] | 1068 |
| 2693 | mer | | [fU][mG][mA][mG][mU][mG][mA][mA][mU] | |
| | | | [mA][mG][mC][mA][mG][mC][mC][mG][ademA- | |
| | | | GalNAc][ademA-GalNAc][ademA- | |
| | | | GalNAc][mG][mG][mC][mU][mG][mC] | |
| STAT3- | Modified 36 | Hs-Mf- | [mUs][mU][mG][mU][mG][mG][mU][fU][fC][fC] | 1069 |
| 2627 | mer | Mm | [fA][mG][mA][mU][mU][mU][mU][mU][mU] | |
| | | | [mA][mG][mC][mA][mG][mC][mC][mG][ademA- | |
| | | | GalNAc][ademA-GalNAc][ademA- | |
| | | | GalNAc][mG][mG][mC][mU][mG][mC] | |
| STAT3- | Modified 36 | Hs-Mf- | [mUs][mU][mU][mG][mU][mG][mG][fU][fU][fC] | 1070 |
| 2626 | mer | Mm | [fC][mA][mG][mA][mU][mU][mU][mU][mU] | |
| | | | [mA][mG][mC][mA][mG][mC][mC][mG][ademA- | |
| | | | GalNAc][ademA-GalNAc][ademA- | |
| | | | GalNAc][mG][mG][mC][mU][mG][mC] | |
| STAT3- | Modified 36 | Hs-Mf- | [mUs][mU][mC][mA][mU][mU][mG][fA][fU][fG] | 1071 |
| 2407 | mer | Mm | [fC][mA][mG][mU][mU][mU][mG][mG][mA] | |
| | | | [mA][mG][mC][mA][mG][mC][mC][mG][ademA- | |
| | | | GalNAc][ademA-GalNAc][ademA- | |
| | | | GalNAc][mG][mG][mC][mU][mG][mC] | |
| STAT3- | Modified 36 | Hs-Mf- | [mUs][mG][mA][mU][mG][mC][mA][fG][fU][fU] | 1072 |
| 2412 | mer | Mm | [fU][mG][mG][mA][mA][mA][mU][mA][mA] | |
| | | | [mA][mG][mC][mA][mG][mC][mC][mG][ademA- | |
| | | | GalNAc][ademA-GalNAc][ademA- | |
| | | | GalNAc][mG][mG][mC][mU][mG][mC] | |
| STAT3- | Modified 36 | Hs-Mf- | [mAs][mC][mA][mU][mG][mU][mC][fA][fU][fU] | 1073 |
| 2151 | mer | Mm | [fU][mG][mC][mU][mG][mA][mA][mA][mU] | |
| | | | [mA][mG][mC][mA][mG][mC][mC][mG][ademA- | |
| | | | GalNAc][ademA-GalNAc][ademA- | |
| | | | GalNAc][mG][mG][mC][mU][mG][mC] | |
| STAT3- | Modified 36 | Hs-Mf- | [mCs][mU][mU][mU][mG][mU][mG][fG][fU][fU] | 1074 |
| 2625 | mer | Mm | [fC][mC][mA][mG][mA][mU][mU][mU][mU] | |
| | | | [mA][mG][mC][mA][mG][mC][mC][mG][ademA- | |
| | | | GalNAc][ademA-GalNAc][ademA- | |
| | | | GalNAc][mG][mG][mC][mU][mG][mC] | |
| STAT3- | Modified 36 | Hs-Mf- | [mUs][mA][mA][mA][mA][mA][mU][fU][fU][fA] | 1075 |
| 4836 | mer | Mm | [fU][mA][mU][mU][mA][mU][mU][mG][mU] | |
| | | | [mA][mG][mC][mA][mG][mC][mC][mG][ademA- | |
| | | | GalNAc][ademA-GalNAc][ademA- | |
| | | | GalNAc][mG][mG][mC][mU][mG][mC] | |
| STAT3- | Modified 36 | Hs-Mf- | [mUs][mC][mA][mU][mU][mG][mA][fU][fG][fC] | 1076 |
| 2408 | mer | Mm | [fA][mG][mU][mU][mU][mG][mG][mA][mA] | |
| | | | [mA][mG][mC][mA][mG][mC][mC][mG][ademA- | |
| | | | GalNAc][ademA-GalNAc][ademA- | |
| | | | GalNAc][mG][mG][mC][mU][mG][mC] | |
| STAT3- | Modified 36 | Hs-Mf- | [mUs][mU][mU][mG][mC][mU][mG][fA][fA][fA] | 1077 |
| 2159 | mer | Mm | [fU][mC][mA][mU][mC][mA][mU][mG][mG] | |
| | | | [mA][mG][mC][mA][mG][mC][mC][mG][ademA- | |
| | | | GalNAc][ademA-GalNAc][ademA- | |
| | | | GalNAc][mG][mG][mC][mU][mG][mC] | |
| STAT3- | Modified 36 | Hs-Mf- | [mGs][mA][mA][mC][mA][mA][mC][fA][fU][fG] | 1078 |
| 2146 | mer | Mm | [fU][mC][mA][mU][mU][mU][mG][mC][mU] | |
| | | | [mA][mG][mC][mA][mG][mC][mC][mG][ademA- | |
| | | | GalNAc][ademA-GalNAc][ademA- | |
| | | | GalNAc][mG][mG][mC][mU][mG][mC] | |
| STAT3- | Modified 36 | Hs-Mf- | [mAs][mC][mA][mA][mC][mA][mU][fG][fU][fC] | 1079 |
| 2148 | mer | Mm | [fA][mU][mU][mU][mG][mC][mU][mG][mA] | |
| | | | [mA][mG][mC][mA][mG][mC][mC][mG][ademA- | |
| | | | GalNAc][ademA-GalNAc][ademA- | |
| | | | GalNAc][mG][mG][mC][mU][mG][mC] | |
| STAT3- | Modified 36 | Hs-Mf- | [mAs][mA][mC][mA][mA][mC][mA][fU][fG][fU] | 1080 |
| 2147 | mer | Mm | [fC][mA][mU][mU][mU][mG][mC][mU][mG] | |
| | | | [mA][mG][mC][mA][mG][mC][mC][mG][ademA- | |
| | | | GalNAc][ademA-GalNAc][ademA- | |
| | | | GalNAc][mG][mG][mC][mU][mG][mC] | |
| STAT3- | Modified 36 | Hs-Mf- | [mCs][mG][mA][mA][mG][mA][mA][fU][fC][fA] | 1081 |
| 0461 | mer | Mm | [fA][mG][mC][mA][mG][mU][mU][mU][mC] | |
| | | | [mA][mG][mC][mA][mG][mC][mC][mG][ademA- | |
| | | | GalNAc][ademA-GalNAc][ademA- | |
| | | | GalNAc][mG][mG][mC][mU][mG][mC] | |
| STAT3- | Modified 36 | Hs-Mf- | [mCs][mC][mU][mU][mG][mC][mC][fA][fG][fU] | 1082 |
| 1584 | mer | Mm | [fU][mG][mU][mG][mG][mU][mG][mA][mU] | |
| | | | [mA][mG][mC][mA][mG][mC][mC][mG][ademA- | |
| | | | GalNAc][ademA-GalNAc][ademA- | |
| | | | GalNAc][mG][mG][mC][mU][mG][mC] | |
| STAT3- | Modified 36 | Hs-Mf- | [mAs][mA][mC][mA][mA][mA][mU][fU][fA][fA] | 1083 |
| 1047 | mer | Mm | [fG][mA][mA][mA][mC][mU][mG][mG][mA] | |
| | | | [mA][mG][mC][mA][mG][mC][mC][mG][ademA- | |
| | | | GalNAc][ademA-GalNAc][ademA- | |
| | | | GalNAc][mG][mG][mC][mU][mG][mC] | |
| STAT3- | Modified 36 | Hs-Mf- | [mCs][mU][mG][mA][mA][mU][mG][fG][fA][fA] | 1084 |
| 0773 | mer | Mm | [fA][mC][mA][mA][mC][mC][mA][mG][mU] | |
| | | | [mA][mG][mC][mA][mG][mC][mC][mG][ademA- | |
| | | | GalNAc][ademA-GalNAc][ademA- | |
| | | | GalNAc][mG][mG][mC][mU][mG][mC] | |
| STAT3- | Modified 36 | Hs-Mf- | [mAs][mU][mC][mU][mU][mG][mA][fG][fA][fA] | 1085 |
| 0492 | mer | Mm | [fG][mC][mC][mA][mA][mU][mG][mG][mA] | |
| | | | [mA][mG][mC][mA][mG][mC][mC][mG][ademA- | |
| | | | GalNAc][ademA-GalNAc][ademA- | |
| | | | GalNAc][mG][mG][mC][mU][mG][mC] | |
| STAT3- | Modified 36 | Hs-Mf- | [mGs][mA][mA][mG][mA][mA][mU][fC][fA][fA] | 1086 |
| 0462 | mer | Mm | [fG][mC][mA][mG][mU][mU][mU][mC][mU] | |
| | | | [mA][mG][mC][mA][mG][mC][mC][mG][ademA- | |
| | | | GalNAc][ademA-GalNAc][ademA- | |
| | | | GalNAc][mG][mG][mC][mU][mG][mC] | |
| STAT3- | Modified 36 | Hs-Mf- | [mUs][mU][mG][mC][mC][mA][mG][fU][fU][fG] | 1087 |
| 1586 | mer | Mm | [fU][mG][mG][mU][mG][mA][mU][mC][mU] | |
| | | | [mA][mG][mC][mA][mG][mC][mC][mG][ademA- | |
| | | | GalNAc][ademA-GalNAc][ademA- | |
| | | | GalNAc][mG][mG][mC][mU][mG][mC] | |
| STAT3- | Modified 36 | Hs-Mf- | [mAs][mU][mC][mU][mG][mA][mA][fU][fG][fG] | 1088 |
| 0771 | mer | Mm | [fA][mA][mA][mC][mA][mA][mC][mC][mA] | |
| | | | [mA][mG][mC][mA][mG][mC][mC][mG][ademA- | |
| | | | GalNAc][ademA-GalNAc][ademA- | |
| | | | GalNAc][mG][mG][mC][mU][mG][mC] | |
| STAT3- | Modified 36 | Hs-Mf- | [mAs][mU][mC][mU][mA][mG][mA][fA][fC][fA] | 1089 |
| 0681 | mer | Mm | [fG][mA][mA][mA][mA][mU][mG][mA][mA] | |
| | | | [mA][mG][mC][mA][mG][mC][mC][mG][ademA- | |
| | | | -GalNAc][ademA-GalNAc][ademA- | |
| | | | GalNAc][mG][mG][mC][mU][mG][mC] | |
| STAT3- | Modified 36 | Hs-Mf- | [mAs][mG][mG][mA][mU][mC][mU][fA][fG][fA] | 1090 |
| 0678 | mer | Mm | [fA][mC][mA][mG][mA][mA][mA][mA][mU] | |
| | | | [mA][mG][mC][mA][mG][mC][mC][mG][ademA- | |
| | | | GalNAc][ademA-GalNAc][ademA- | |
| | | | GalNAc][mG][mG][mC][mU][mG][mC] | |
| STAT3- | Modified 36 | Hs-Mf- | [mAs][mA][mA][mA][mA][mU][mU][fU][fA][fU] | 1091 |
| 4837 | mer | Mm | [fA][mU][mU][mA][mU][mU][mG][mU][mG] | |
| | | | [mA][mG][mC][mA][mG][mC][mC][mG][ademA- | |
| | | | GalNAc][ademA-GalNAc][ademA- | |
| | | | GalNAc][mG][mG][mC][mU][mG][mC] | |
| STAT3- | Modified 36 | Hs-Mf- | [mGs][mU][mG][mU][mA][mA][mA][A][fA][fU] | 1092 |
| 4833 | mer | Mm | [fU][mU][mA][mU][mA][mU][mU][mA][mU] | |
| | | | [mA][mG][mC][mA][mG][mC][mC][mG][ademA- | |
| | | | GalNAc][ademA-GalNAc][ademA- | |
| | | | GalNAc][mG][mG][mC][mU][mG][mC] | |
| STAT3- | Modified 36 | Hs | [mAs][mG][mU][mU][mG][mC][mA][fG][fC][fA] | 1093 |
| 1068 | mer | | [fA][mA][mA][mA][mG][mU][mU][mU][mC] | |
| | | | [mA][mG][mC][mA][mG][mC][mC][mG][ademA- | |
| | | | GalNAc][ademA-GalNAc][ademA- | |
| | | | GalNAc][mG][mG][mC][mU][mG][mC] | |
| STAT3- | Modified 36 | Hs | [mAs][mA][mG][mA][mA][mU][mG][fU][fA][fA] | 1094 |
| 1673 | mer | | [fA][mC][mU][mU][mU][mU][mU][mU][mA] | |
| | | | [mA][mG][mC][mA][mG][mC][mC][mG][ademA- | |
| | | | GalNAc][ademA-GalNAc][ademA- | |
| | | | GalNAc][mG][mG][mC][mU][mG][mC] | |
| STAT3- | Modified 36 | Hs | [mUs][mG][mC][mA][mA][mG][mA][fG][fU][fC] | 1095 |
| 0426 | mer | | [fG][mA][mA][mU][mG][mU][mU][mC][mU] | |
| | | | [mA][mG][mC][mA][mG][mC][mC][mG][ademA- | |
| | | | GalNAc][ademA-GalNAc][ademA- | |
| | | | GalNAc][mG][mG][mC][mU][mG][mC] | |
| STAT3- | Modified 36 | Hs | [mAs][mG][mA][m][m][m][m][f][fU][fG] | 1096 |
| 2404 | mer | | [fA][mU][mG][mC][mA][mG][mU][mU][mU] | |
| | | | [mA][mG][mC][mA][mG][mC][mC][mG][ademA- | |
| | | | GalNAc][ademA-GalNAc][ademA- | |
| | | | GalNAc][mG][mG][mC][mU][mG][mC] | |
| STAT3- | Modified 36 | Hs | [mGs][mA][mG][mU][mU][mG][mC][fA][fG][fC] | 1097 |
| 1067 | mer | | [fA][mA][mA][mA][mA][mG][mU][mU][mU] | |
| | | | [mA][mG][mC][mA][mG][mC][mC][mG][ademA- | |
| | | | GalNAc][ademA-GalNAc][ademA- | |
| | | | GalNAc][mG][mG][mC][mU][mG][mC] | |
| STAT3- | Modified 36 | Hs | [mGs][mU][mC][mG][mA][mA][mU][fG][fU][fU] | 1098 |
| 0433 | mer | | [fC][mU][mC][mU][mA][mU][mC][mA][mG] | |
| | | | [mA][mG][mC][mA][mG][mC][mC][mG][ademA- | |
| | | | GalNAc][ademA-GalNAc][ademA- | |
| | | | GalNAc][mG][mG][mC][mU][mG][mC] | |
| STAT3- | Modified 36 | Hs | [mCs][mC][mC][mA][mA][mG][mA][fA][fU][fG] | 1099 |
| 1670 | mer | | [fU][mA][mA][mA][mC][mU][mU][mU][mU] | |
| | | | [mA][mG][mC][mA][mG][mC][mC][mG][ademA- | |
| | | | GalNAc][ademA-GalNAc][ademA- | |
| | | | GalNAc][mG][mG][mC][mU][mG][mC] | |
| STAT3- | Modified 36 | Hs | [mGs][mU][mG][mA][mU][mG][mA][fA][fC][fA] | 1100 |
| 1388 | mer | | [fU][mG][mG][mA][mA][mG][mA][mA][mU] | |
| | | | [mA][mG][mC][mA][mG][mC][mC][mG][ademA- | |
| | | | GalNAc][ademA-GalNAc][ademA- | |
| | | | GalNAc][mG][mG][mC][mU][mG][mC] | |
| STAT3- | Modified 36 | Hs | [mAs][mA][mG][mA][mG][mU][mC][fG][fA][fA] | 1101 |
| 0429 | mer | | [fU][mG][mU][mU][mC][mU][mC][mU][mA] | |
| | | | [mA][mG][mC][mA][mG][mC][mC][mG][ademA- | |
| | | | GalNAc][ademA-GalNAc][ademA- | |
| | | | GalNAc][mG][mG][mC][mU][mG][mC] | |
| STAT3- | Modified 36 | Hs | [mGs][mA][mU][mU][mC][mA][mU][fU][fG][fA] | 1102 |
| 2405 | mer | | [fU][mG][mC][mA][mG][mU][mU][mU][mG] | |
| | | | [mA][mG][mC][mA][mG][mC][mC][mG][ademA- | |
| | | | GalNAc][ademA-GalNAc][ademA- | |
| | | | GalNAc][mG][mG][mC][mU][mG][mC] | |
| STAT3- | Modified 36 | Hs | [mAs][mG][mA][mG][mU][mC][mG][fA][fA][fU] | 1103 |
| 0430 | mer | | [fG][mU][mU][mC][mU][mC][mU][mA][mU] | |
| | | | [mA][mG][mC][mA][mG][mC][mC][mG][ademA- | |
| | | | GalNAc][ademA-GalNAc][ademA- | |
| | | | GalNAc][mG][mG][mC][mU][mG][mC] | |
| STAT3- | Modified 36 | Hs | [mAs][mG][mU][mC][mG][mA][mA][fU][fG][fU] | 1104 |
| 0432 | mer | | [fU][mC][mU][mC][mU][mA][mU][mC][mA] | |
| | | | [mA][mG][mC][mA][mG][mC][mC][mG][ademA- | |
| | | | GalNAc][ademA-GalNAc][ademA- | |
| | | | GalNAc][mG][mG][mC][mU][mG][mC] | |
| STAT3- | Modified 36 | Hs | [mCs][mU][mG][mG][mU][mG][mU][fG][fA][fA] | 1105 |
| 1815 | mer | | [fU][mU][mA][mU][mU][mC][mA][mG][mG] | |
| | | | [mA][mG][mC][mA][mG][mC][mC][mG][ademA- | |
| | | | GalNAc][ademA-GalNAc][ademA- | |
| | | | GalNAc][mG][mG][mC][mU][mG][mC] | |
| STAT3- | Modified 36 | Hs | [mCs][mC][mU][mG][mC][mA][mA][fG][fA][fG] | 1106 |
| 0424 | mer | | [fU][mC][mG][mA][mA][mU][mG][mU][mU] | |
| | | | [mA][mG][mC][mA][mG][mC][mC][mG][ademA- | |
| | | | GalNAc][ademA-GalNAc][ademA- | |
| | | | GalNAc][mG][mG][mC][mU][mG][mC] | |
| STAT3- | Modified 36 | Hs | [mAs][mC][mC][mU][mU][mC][mC][fU][fG][fC] | 1107 |
| 2024 | mer | | [fU][mA][mA][mG][mA][mU][mU][mC][mA] | |
| | | | [mA][mG][mC][mA][mG][mC][mC][mG][ademA- | |
| | | | GalNAc][ademA-GalNAc][ademA- | |
| | | | GalNAc][mG][mG][mC][mU][mG][mC] | |
| STAT3- | Modified 36 | Hs | [mAs][mC][mC][mU][mG][mG][mU][fG][fU][fG] | 1108 |
| 1813 | mer | | [fA][mA][mU][mU][mA][mU][mU][mC][mA] | |
| | | | [mA][mG][mC][mA][mG][mC][mC][mG][ademA- | |
| | | | GalNAc][ademA-GalNAc][ademA- | |
| | | | GalNAc][mG][mG][mC][mU][mG][mC] | |
| STAT3- | Modified 36 | Hs | [mAs][mG][mA][mA][mU][mG][mU][fA][fA][fA] | 1109 |
| 1674 | mer | | [fC][mU][mU][mU][mU][mU][mU][mA][mC | |
| | | | [mA][mG][mC][mA][mG][mC][mC][mG][ademA- | |
| | | | GalNAc][ademA-GalNAc][ademA- | |
| | | | GalNAc][mG][mG][mC][mU][mG][mC] | |
| STAT3- | Modified 36 | Hs | [mCs][mA][mG][mU][mU][mC][mA][fC][fU][fA] | 1110 |
| 1241 | mer | | [fC][mU][mA][mA][mA][mG][mU][mC][mA] | |
| | | | [mA][mG][mC][mA][mG][mC][mC][mG][ademA- | |
| | | | GalNAc][ademA-GalNAc][ademA- | |
| | | | GalNAc][mG][mG][mC][mU][mG][mC] | |
| STAT3- | Modified 36 | Hs | [mCs][mA][mA][mG][mA][mA][mU][fG][fU][fA] | 1111 |
| 1672 | mer | | [fA][mA][mC][mU][mU][mU][mU][mU][mU] | |
| | | | [mA][mG][mC][mA][mG][mC][mC][mG][ademA- | |
| | | | GalNAc][ademA-GalNAc][ademA- | |
| | | | GalNAc][mG][mG][mC][mU][mG][mC] | |
| STAT3- | Modified 36 | Hs | [mCs][mU][mG][mC][mA][mA][mG][A][fG][fU] | 1112 |
| 0425 | mer | | [fC][mG][mA][mA][mU][mG][mU][mU][mC] | |
| | | | [mA][mG][mC][mA][mG][mC][mC][mG][ademA- | |
| | | | GalNAc][ademA-GalNAc][ademA- | |
| | | | GalNAc][mG][mG][mC][mU][mG][mC] | |
| STAT3- | Modified 36 | Hs | [mGs][mG][mU][mG][mU][mG][mA][A][fU][fU] | 1113 |
| 1817 | mer | | [fA][mU][mU][mC][mA][mG][G][mG][mU] | |
| | | | [mA][mG][mC][mA][mG][mC][mC][mG][ademA- | |
| | | | GalNAc][ademA-GalNAc][ademA- | |
| | | | GalNAc][mG][mG][mC][mU][mG][mC] | |
| STAT3- | Modified 36 | Hs | [mCs][mC][mA][mA][mG][mA][mA][fU][fG][fU] | 1114 |
| 1671 | mer | | [fA][mA][mA][mC][mU][mU][mU][mU][mU] | |
| | | | [mA][mG][mC][mA][mG][mC][mC][mG][ademA- | |
| | | | GalNAc][ademA-GalNAc][ademA- | |
| | | | GalNAc][mG][mG][mC][mU][mG][mC] | |
| STAT3- | Modified 36 | Hs-Mm | [mAs][mG][mC][mA][mG][mC][mA][fG][fC][fU] | 1115 |
| 2136 | mer | | [fG][mA][mA][mC][mA][mA][mC][mA][mU] | |
| | | | [mA][mG][mC][mA][mG][mC][mC][mG][ademA- | |
| | | | GalNAc][ademA-GalNAc][ademA- | |
| | | | GalNAc][mG][mG][mC][mU][mG][mC] | |
| STAT3- | Modified 36 | Hs-Mm | [mGs][mC][mU][mG][mA][mA][mC][A][fA][fC] | 1116 |
| 2143 | mer | | [fA][mU][mG][mU][mC][mA][mU][mU][mU] | |
| | | | [mA][mG][mC][mA][mG][mC][mC][mG][ademA- | |
| | | | GalNAc][ademA-GalNAc][ademA- | |
| | | | GalNAc][mG][mG][mC][mU][mG][mC] | |
| STAT3- | Modified 36 | Hs-Mm | [mCs][mU][mG][mA][mA][mC][mA][fA][fC][fA] | 1117 |
| 2144 | mer | | [fU][mG][mU][mC][mA][mU][mU][mU][mG] | |
| | | | [mA][mG][mC][mA][mG][mC][mC][mG][ademA- | |
| | | | GalNAc][ademA-GalNAc][ademA- | |
| | | | GalNAc][mG][mG][mC][mU][mG][mC] | |
| STAT3- | Modified 36 | Hs-Mm | [mCs][mA][mG][mC][mA][mG][mC][fU][fG][fA] | 1118 |
| 2138 | mer | | [fA][mC][mA][mA][mC][mA][mU][mG][mU] | |
| | | | [mA][mG][mC][mA][mG][mC][mC][mG][ademA- | |
| | | | GalNAc][ademA-GalNAc][ademA- | |
| | | | GalNAc][mG][mG][mC][mU][mG][mC] | |
| STAT3- | Modified 36 | Hs-Mm | [mUs][mU][mU][mA][mA][mC][mU][fU][fC][fC] | 1119 |
| 4909 | mer | | [fA][mG][mA][mA][mA][mU][mA][mA][mA] | |
| | | | [mA][mG][mC][mA][mG][mC][mC][mG][ademA- | |
| | | | GalNAc][ademA-GalNAc][ademA- | |
| | | | GalNAc][mG][mG][mC][mU][mG][mC] | |
| STAT3- | Modified 36 | Hs-Mm | [mAs][mG][mC][mA][mG][mC][mU][fG][fA][fA] | 1120 |
| 2139 | mer | | [fC][mA][mA][mC][mA][mU][mG][mU][mC] | |
| | | | [mA][mG][mC][mA][mG][mC][mC][mG][ademA- | |
| | | | GalNAc][ademA-GalNAc][ademA- | |
| | | | GalNAc][mG][mG][mC][mU][mG][mC] | |
| STAT3- | Modified 36 | Hs-Mm | [mUs][mU][mG][mA][mU][mG][mC][fA][fG][fU] | 1121 |
| 2411 | mer | | [fU][mU][mG][mG][mA][mA][mA][mU][mA] | |
| | | | [mA][mG][mC][mA][mG][mC][mC][mG][ademA- | |
| | | | GalNAc][ademA-GalNAc][ademA- | |
| | | | GalNAc][mG][mG][mC][mU][mG][mC] | |
| STAT3- | Modified 36 | Hs-Mm | [mUs][mG][mA][mA][mC][mA][mA][fC][fA][fU] | 1122 |
| 2145 | mer | | [fG][mU][mC][mA][mU][mU][mU][mG][mC] | |
| | | | [mA][mG][mC][mA][mG][mC][mC][mG][ademA- | |
| | | | GalNAc][ademA-GalNAc][ademA- | |
| | | | GalNAc][mG][mG][mC][mU][mG][mC] | |
| STAT3- | Modified 36 | Hs-Mm | [mUs][mA][mG][mU][mG][mU][mA][fA][fA][fA] | 1123 |
| 4831 | mer | | [fA][mU][mU][mU][mA][mU][mA][mU][mU] | |
| | | | [mA][mG][mC][mA][mG][mC][mC][mG][ademA- | |
| | | | GalNAc][ademA-GalNAc][ademA- | |
| | | | GalNAc][mG][mG][mC][mU][mG][mC] | |
| STAT3- | Modified 36 | Hs-Mm | [mUs][mA][mA][mC][mU][mU][mU][fG][fU][fG] | 1124 |
| 2622 | mer | | [fG][mU][mU][mC][mC][mA][mG][mA][mU] | |
| | | | [mA][mG][mC][mA][mG][mC][mC][mG][ademA- | |
| | | | GalNAc][ademA-GalNAc][ademA- | |
| | | | GalNAc][mG][mG][mC][mU][mG][mC] | |
| STAT3- | Modified 36 | Hs-Mm | [mAs][mA][mG][mC][mA][mG][mC][A][fG][fC] | 1125 |
| 2135 | mer | | [fU][mG][mA][mA][mC][mA][mA][mC][mA] | |
| | | | [mA][mG][mC][mA][mG][mC][mC][mG][ademA- | |
| | | | GalNAc][ademA-GalNAc][ademA- | |
| | | | GalNAc][mG][mG][mC][mU][mG][mC] | |
| STAT3- | Modified 36 | Hs-Mm | [mCs][mA][mA][mA][mA][mG][mU][fG][fA][fU] | 1126 |
| 1383 | mer | | [fG][mA][mA][mC][mA][mU][mG][mG][mA] | |
| | | | [mA][mG][mC][mA][mG][mC][mC][mG][ademA- | |
| | | | GalNAc][ademA-GalNAc][ademA- | |
| | | | GalNAc][mG][mG][mC][mU][mG][mC] | |
| STAT3- | Modified 22 | | [MePhosphonate-4O- | 1127 |
| 715 | mer | | mUs][fGs][fAs][fA][fA][mU][fC][mA][mA][fA] | |
| | | | [mG][mU][mC][fA][mU][mC][mC][mU][mG] | |
| | | | [mGs][mGs][mG] | |
| STAT3- | Modified 22 | | [MePhosphonate-4O- | 1128 |
| 716 | mer | | mUs][fUs][fGs][fA][fA][mA][fU][mC][mA][fA] | |
| | | | [mA][mG][mU][fC][mA][mU][mC][mC][mU] | |
| | | | [mGs][mGs][mG] | |
| STAT3- | Modified 22 | | [MePhosphonate-4O- | 1129 |
| 717 | mer | | mUs][fUs][fUs][fG][fA][mA][fA][mU][mC][fA] | |
| | | | [mA][mA][mG][fU][mC][mA][mU][mC][mC] | |
| | | | [mUs][mGs][mG] | |
| STAT3- | Modified 22 | | [MePhosphonate-4O- | 1130 |
| 720 | mer | | mUs][fUs][fAs][fG][fU][mU][fG][mA][mA][fA] | |
| | | | [mU][mC][mA][fA][mA][mG][mU][mC][mA] | |
| | | | [mUs][mGs][mG] | |
| STAT3- | Modified 22 | | [MePhosphonate-4O- | 1131 |
| 372 | mer | | mUs][fAs][fGs][fA][fU][mU][fA][mU][mG][fA] | |
| | | | [mA][mA][mC][fA][mC][mC][mA][mA][mA] | |
| | | | [mGs][mGs][mG] | |
| STAT3- | Modified 22 | | [MePhosphonate-4O- | 1132 |
| 721 | mer | | mUs][fAs][fUs][fA][fG][mU][fU][mG][mA][fA] | |
| | | | [mA][mU][mC][fA][mA][mA][mG][mU][mC] | |
| | | | [mAs][mGs][mG] | |
| STAT3- | Modified 22 | | [MePhosphonate-4O- | 1133 |
| 722 | mer | | mUs][fUs][fAs][fU][fA][mG][fU][mU][mG][fA] | |
| | | | [mA][mA][mU][fC][mA][mA][mA][mG][mU] | |
| | | | [mCs][mGs][mG] | |
| STAT3- | Modified 22 | | [MePhosphonate-4O- | 1134 |
| 768 | mer | | mUs][fUs][fUs][fG][fU][mU][fU][mC][mC][fA] | |
| | | | [mU][mU][mC][fA][mG][mA][mU][mC][mU] | |
| | | | [mUs][mGs][mG] | |
| STAT3- | Modified 22 | | [MePhosphonate-4O- | 1135 |
| 1001 | mer | | mUs][fAs][fUs][fG][fA][mC][fG][mU][mU][fA] | |
| | | | [mU][mC][mC][fA][mG][mU][mU][mU][mU] | |
| | | | [mCs][mGs][mG] | |
| STAT3- | Modified 22 | | [MePhosphonate-4O- | 1136 |
| 1006 | mer | | mUs][fUs][fGs][fC][fU][mA][fA][mU][mG][fA] | |
| | | | [mC][mG][mU][fU][mA][mU][mC][mC][mA] | |
| | | | [mGs][mGs][mG] | |
| STAT3- | Modified 22 | | [MePhosphonate-4O- | 1137 |
| 1145 | mer | | mUs][fUs][fCs][fA][fU][mU][fA][mA][mG][fU] | |
| | | | [mU][mU][mC][fU][mA][mA][mA][mC][mA] | |
| | | | [mGs][mGs][mG] | |
| STAT3- | Modified 22 | | [MePhosphonate-4O- | 1138 |
| 1151 | mer | | mUs][fCs][fAs][fC][fU][mU][fU][mU][mC][fA] | |
| | | | [mU][mU][mA][fA][mG][mU][mU][mU][mC] | |
| | | | [mUs][mGs][mG] | |
| STAT3- | Modified 22 | | [MePhosphonate-4O- | 1139 |
| 1268 | mer | | mUs][fUs][fCs][fA][fA][mC][fU][mC][mA][fG] | |
| | | | [mG][mG][mA][fA][mU][mU][mU][mG][mA] | |
| | | | [mCs][mGs][mG] | |
| STAT3- | Modified 22 | | [MePhosphonate-4O- | 1140 |
| 1273 | mer | | mUs][fAs][fUs][fA][fA][mU][fU][mC][mA][fA] | |
| | | | [mC][mU][mC][fA][mG][mG][mG][mA][mA] | |
| | | | [mUs][mGs][mG] | |
| STAT3- | Modified 22 | | [MePhosphonate-4O- | 1141 |
| 1279 | mer | | mUs][fAs][fAs][fG][fC][mU][fG][mA][mU][fA] | |
| | | | [mA][mU][mU][fC][mA][mA][mC][mU][mC] | |
| | | | [mAs][mGs][mG] | |
| STAT3- | Modified 22 | | [MePhosphonate-4O- | 1142 |
| 1280 | mer | | mUs][fUs][fAs][fA][fG][mC][fU][mG][mA][fU] | |
| | | | [mA][mA][mU][fU][mC][mA][mA][mC][mU] | |
| | | | [mCs][mGs][mG] | |
| STAT3- | Modified 22 | | [MePhosphonate-4O- | 1143 |
| 1281 | mer | | mUs][fUs][fUs][fA][fA][mG][fC][mU][mG][fA] | |
| | | | [mU][mA][mA][fU][mU][mC][mA][mA][mC] | |
| | | | [mUs][mGs][mG] | |
| STAT3- | Modified 22 | | [MePhosphonate-4O- | 1144 |
| 1284 | mer | | mUs][fAs][fUs][fU][fU][mU][fA][mA][mG][fC] | |
| | | | [mU][mG][mA][fU][mA][mA][mU][mU][mC] | |
| | | | [mAs][mGs][mG] | |
| STAT3- | Modified 22 | | [MePhosphonate-4O- | 1145 |
| 1286 | mer | | mUs][fUs][fAs][fA][fU][mU][fU][mU][mA][fA] | |
| | | | [mG][mC][mU][fG][mA][mU][mA][mA][mU] | |
| | | | [mUs][mGs][mG] | |
| STAT3- | Modified 22 | | [MePhosphonate-4O- | 1146 |
| 1287 | mer | | mUs][fUs][fUs][fA][fA][mU][fU][mU][mU][fA] | |
| | | | [mA][mG][mC][fU][mG][mA][mU][mA][mA] | |
| | | | [mUs][mGs][mG] | |
| STAT3- | Modified 22 | | [MePhosphonate-4O- | 1147 |
| 1292 | mer | | mUs][fAs][fCs][fA][fC][mU][fU][mU][mA][fA] | |
| | | | [mU][mU][mU][fU][mA][mA][mG][mC][mU] | |
| | | | [mGs][mGs][mG] | |
| STAT3- | Modified 22 | | [MePhosphonate-4O- | 1148 |
| 1293 | mer | | mUs][fCs][fAs][fC][fA][mC][fU][mU][mU][fA] | |
| | | | [mA][mU][mU][fU][mU][mA][mA][mG][mC] | |
| | | | [mUs][mGs][mG] | |
| STAT3- | Modified 22 | | [MePhosphonate-4O- | 1149 |
| 1819 | mer | | mUs][fAs][fCs][fA][fC][mC][fC][mU][mG][fA] | |
| | | | [mA][mU][mA][fA][mU][mU][mC][mA][mC] | |
| | | | [mAs][mGs][mG] | |
| STAT3- | Modified 22 | | [MePhosphonate-4O- | 1150 |
| 1908 | mer | | mUs][fAs][fCs][fA][fA][mG][fG][mU][mC][fA] | |
| | | | [mA][mU][mG][fA][mU][mA][mU][mU][mG] | |
| | | | [mUs][mGs][mG] | |
| STAT3- | Modified 22 | | [MePhosphonate-4O- | 1151 |
| 1910 | mer | | mUs][fUs][fCs][fA][fC][mA][fA][mG][mG][fU] | |
| | | | [mC][mA][mA][fU][mG][mA][mU][mA][mU] | |
| | | | [mUs][mGs][mG] | |
| STAT3- | Modified 22 | | [MePhosphonate-4O- | 1152 |
| 1913 | mer | | mUs][fUs][fUs][fU][fU][mC][fA][mC][mA][fA] | |
| | | | [mG][mG][mU][fC][mA][mA][mU][mG][mA] | |
| | | | [mUs][mGs][mG] | |
| STAT3- | Modified 22 | | [MePhosphonate-4O- | 1153 |
| 2154 | mer | | mUs][fAs][fUs][fG][fA][mU][fU][mU][mC][fA] | |
| | | | [mG][mC][mA][fA][mA][mU][mG][mA][mC] | |
| | | | [mAs][mGs][mG] | |
| STAT3- | Modified 22 | | [MePhosphonate-4O- | 1154 |
| 2327 | mer | | mUs][fAs][fGs][fA][fU][mA][fA][mA][mC][fU] | |
| | | | [mU][mG][mG][fU][mC][mU][mU][mC][mA] | |
| | | | [mGs][mGs][mG] | |
| STAT3- | Modified 22 | | [MePhosphonate-4O- | 1155 |
| 2335 | mer | | mUs][fUs][fGs][fU][fC][mA][fC][mA][mC][fA] | |
| | | | [mG][mA][mU][fA][mA][mA][mC][mU][mU] | |
| | | | [mGs][mGs][mG] | |
| STAT3- | Modified 22 | | [MePhosphonate-4O- | 1156 |
| 2418 | mer | | mUs][fUs][fCs][fA][fC][mC][fA][mU][mU][fA] | |
| | | | [mU][mU][mU][fC][mC][mA][mA][mA][mC] | |
| | | | [mUs][mGs][mG] | |
| STAT3- | Modified 22 | | [MePhosphonate-4O- | 1157 |
| 2692 | mer | | mUs][fUs][fUs][fC][fA][mC][fU][mC][mA][fU] | |
| | | | [mU][mU][mC][fU][mC][mU][mA][mU][mU] | |
| | | | [mUs][mGs][mG] | |
| STAT3- | Modified 22 | | [MePhosphonate-4O- | 1158 |
| 2693 | mer | | mUs][fAs][fUs][fU][fC][mA][fC][mU][mC][fA] | |
| | | | [mU][mU][mU][fC][mU][mC][mU][mA][mU] | |
| | | | [mUs][mGs][mG] | |
| STAT3- | Modified 22 | Hs-Mf- | [MePhosphonate-4O- | 1159 |
| 2627 | mer | Mm | mUs][fAs][fA][fA][fA][mA][fA][mU][mC][fU] | |
| | | | [mG][mG][mA][fA][mC][mC][mA][mC][mA] | |
| | | | [mAs][mGs][mG] | |
| STAT3- | Modified 22 | Hs-Mf- | [MePhosphonate-4O- | 1160 |
| 2626 | mer | Mm | mUs][fAs][fA][fA][fA][mA][fU][mC][mU][fG] | |
| | | | [mG][mA][mA][fC][mC][mA][mC][mA][mA] | |
| | | | [mAs][mGs][mG] | |
| STAT3- | Modified 22 | Hs-Mf- | [MePhosphonate-4O- | 1161 |
| 2407 | mer | Mm | mUs][fUs][fC][fC][fA][mA][fA][mC][mU][fG] | |
| | | | [mC][mA][mU][fC][mA][mA][mU][mG][mA] | |
| | | | [mAs][mGs][mG] | |
| STAT3- | Modified 22 | Hs-Mf- | [MePhosphonate-4O- | 1162 |
| 2412 | mer | Mm | mUs][fUs][fU][fA][fU][mU][fU][mC][mC][fA] | |
| | | | [mA][mA][mC][fU][mG][mC][mA][mU][mC] | |
| | | | [mAs][mGs][mG] | |
| STAT3- | Modified 22 | Hs-Mf- | [MePhosphonate-4O- | 1163 |
| 2151 | mer | Mm | mUs][fAs][fU][fU][fU][mC][fA][mG][mC][fA] | |
| | | | [mA][mA][mU][fG][mA][mC][mA][mU][mG] | |
| | | | [mUs][mGs][mG] | |
| STAT3- | Modified 22 | Hs-Mf- | [MePhosphonate-4O- | 1164 |
| 2625 | mer | Mm | mUs][fAs][fA][fA][fA][mU][fC][mU][mG][fG] | |
| | | | [mA][mA][mC][fC][mA][mC][mA][mA][mA] | |
| | | | [mGs][mGs][mG] | |
| STAT3- | Modified 22 | Hs-Mf- | [MePhosphonate-4O- | 1165 |
| 4836 | mer | Mm | mUs][fAs][fC][fA][fA][mU][fA][mA][mU][fA] | |
| | | | [mU][mA][mA][fA][mU][mU][mU][mU][mU] | |
| | | | [mAs][mGs][mG] | |
| STAT3- | Modified 22 | Hs-Mf- | [MePhosphonate-4O- | 1166 |
| 2408 | mer | Mm | mUs][fUs][fU][fC][fC][mA][fA][mA][mC][fU] | |
| | | | [mG][mC][mA][fU][mC][mA][mA][mU][mG] | |
| | | | [mAs][mGs][mG] | |
| STAT3- | Modified 22 | Hs-Mf- | [MePhosphonate-4O- | 1167 |
| 2159 | mer | Mm | mUs][fCs][fC][fA][fU][mG][fA][mU][mG][fA] | |
| | | | [mU][mU][mU][fC][mA][mG][mC][mA][mA] | |
| | | | [mAs][mGs][mG] | |
| STAT3- | Modified 22 | Hs-Mf- | [MePhosphonate-4O- | 1168 |
| 2146 | mer | Mm | mUs][fAs][fG][fC][fA][mA][fA][mU][mG][fA] | |
| | | | [mC][mA][mU][fG][mU][mU][mG][mU][mU] | |
| | | | [mCs][mGs][mG] | |
| STAT3- | Modified 22 | Hs-Mf- | [MePhosphonate-4O- | 1169 |
| 2148 | mer | Mm | mUs][fUs][fC][fA][fG][mC][fA][mA][mA][fU] | |
| | | | [mG][mA][mC][fA][mU][mG][mU][mU][mG] | |
| | | | [mUs][mGs][mG] | |
| STAT3- | Modified 22 | Hs-Mf- | [MePhosphonate-4O- | 1170 |
| 2147 | mer | Mm | mUs][fCs][fA][fG][fC][mA][fA][mA][mU][fG] | |
| | | | [mA][mC][mA][fU][mG][mU][mU][mG][mU] | |
| | | | [mUs][mGs][mG] | |
| STAT3- | Modified 22 | Hs-Mf- | [MePhosphonate-4O- | 1171 |
| 0461 | mer | Mm | mUs][fGs][fA][fA][fA][mC][fU][mG][mC][fU] | |
| | | | [mU][mG][mA][fU][mU][mC][mU][mU][mC] | |
| | | | [mGs][mGs][mG] | |
| STAT3- | Modified 22 | Hs-Mf- | [MePhosphonate-4O- | 1172 |
| 1584 | mer | Mm | mUs][fAs][fU][fC][fA][mC][fC][mA][mC][fA] | |
| | | | [mA][mC][mU][fG][mG][mC][mA][mA][mG] | |
| | | | [mGs][mGs][mG] | |
| STAT3- | Modified 22 | Hs-Mf- | [MePhosphonate-4O- | 1173 |
| 1047 | mer | Mm | mUs][fUs][fC][fC][fA][mG][fU][mU][mU][fC] | |
| | | | [mU][mU][mA][fA][mU][mU][mU][mG][mU] | |
| | | | [mUs][mGs][mG] | |
| STAT3- | Modified 22 | Hs-Mf- | [MePhosphonate-4O- | 1174 |
| 0773 | mer | Mm | mUs][fAs][fC][fU][fG][mG][fU][mU][mG][fU] | |
| | | | [mU][mU][mC][fC][mA][mU][mU][mC][mA] | |
| | | | [mGs][mGs][mG] | |
| STAT3- | Modified 22 | Hs-Mf- | [MePhosphonate-4O- | 1175 |
| 0492 | mer | Mm | mUs][fUs][fC][fC][fA][mU][fU][mG][mG][fC] | |
| | | | [mU][mU][mC][fU][mC][mA][mA][mG][mA] | |
| | | | [mUs][mGs][mG] | |
| STAT3- | Modified 22 | Hs-Mf- | [MePhosphonate-4O- | 1176 |
| 0462 | mer | Mm | mUs][fAs][fG][fA][fA][mA][fC][mU][mG][fC] | |
| | | | [mU][mU][mG][fA][mU][mU][mC][mU][mU] | |
| | | | [mCs][mGs][mG] | |
| STAT3- | Modified 22 | Hs-Mf- | [MePhosphonate-4O- | 1177 |
| 1586 | mer | Mm | mUs][fAs][fG][fA][fU][mC][fA][mC][mC][fA] | |
| | | | [mC][mA][mA][fC][mU][mG][mG][mC][mA] | |
| | | | [mAs][mGs][mG] | |
| STAT3- | Modified 22 | Hs-Mf- | [MePhosphonate-4O- | 1178 |
| 0771 | mer | Mm | mUs][fUs][fG][fG][fU][mU][fG][mU][mU][fU] | |
| | | | [mC][mC][mA][fU][mU][mC][mA][mG][mA] | |
| | | | [mUs][mGs][mG] | |
| STAT3- | Modified 22 | Hs-Mf- | [MePhosphonate-4O- | 1179 |
| 0681 | mer | Mm | mUs][fUs][fU][fC][fA][mU][fU][mU][mU][fC] | |
| | | | [mU][mG][mU][fU][mC][mU][mA][mG][mA] | |
| | | | [mUs][mGs][mG] | |
| STAT3- | Modified 22 | Hs-Mf- | [MePhosphonate-4O- | 1180 |
| 0678 | mer | Mm | mUs][fAs][fU][fU][fU][mU][fC][mU][mG][fU] | |
| | | | [mU][mC][mU][fA][mG][mA][mU][mC][mC] | |
| | | | [mUs][mGs][mG] | |
| STAT3- | Modified 22 | Hs-Mf- | [MePhosphonate-4O- | 1181 |
| 4837 | mer | Mm | mUs][fCs][fA][fC][fA][mA][fU][mA][mA][fU] | |
| | | | [mA][mU][mA][fA][mA][mU][mU][mU][mU] | |
| | | | [mUs][mGs][mG] | |
| STAT3- | Modified 22 | Hs-Mf- | [MePhosphonate-4O- | 1182 |
| 4833 | mer | Mm | mUs][fAs][fU][fA][fA][mU][fA][mU][mA][fA] | |
| | | | [mA][mU][mU][fU][mU][mU][mA][mC][mA] | |
| | | | [mCs][mGs][mG] | |
| STAT3- | Modified 22 | Hs | [MePhosphonate-4O- | 1183 |
| 1068 | mer | | mUs][fGs][fA][fA][fA][mC][fU][mU][mU][fU] | |
| | | | [mU][mG][mC][fU][mG][mC][mA][mA][mC] | |
| | | | [mUs][mGs][mG] | |
| STAT3- | Modified 22 | Hs | [MePhosphonate-4O- | 1184 |
| 1673 | mer | | mUs][fUs][fA][fA][fA][mA][fA][mA][mG][fU] | |
| | | | [mU][mU][mA][fC][mA][mU][mU][mC][mU] | |
| | | | [mUs][mGs][mG] | |
| STAT3- | Modified 22 | Hs | [MePhosphonate-4O- | 1185 |
| 0426 | mer | | mUs][fAs][fG][fA][fA][mC][fA][mU][mU][fC] | |
| | | | [mG][mA][mC][fU][mC][mU][mU][mG][mC] | |
| | | | [mAs][mGs][mG] | |
| STAT3- | Modified 22 | Hs | [MePhosphonate-4O- | 1186 |
| 2404 | mer | | mUs][fAs][fA][fA][fC][mU][fG][mC][mA][fU] | |
| | | | [mC][mA][mA][fU][mG][mA][mA][mU][mC] | |
| | | | [mUs][mGs][mG] | |
| STAT3- | Modified 22 | Hs | [MePhosphonate-4O- | 1187 |
| 1067 | mer | | mUs][fAs][fA][fA][fC][mU][fU][mU][mU][fU] | |
| | | | [mG][mC][mU][fG][mC][mA][mA][mC][mU] | |
| | | | [mCs][mGs][mG] | |
| STAT3- | Modified 22 | Hs | [MePhosphonate-4O- | 1188 |
| 0433 | mer | | mUs][fCs][fU][fG][fA][mU][fA][mG][mA][fG] | |
| | | | [mA][mA][mC][fA][mU][mU][mC][mG][mA] | |
| | | | [mCs][mGs][mG] | |
| STAT3- | Modified 22 | Hs | [MePhosphonate-4O- | 1189 |
| 1670 | mer | | mUs][fAs][fA][fA][fA][mG][fU][mU][mU][fA] | |
| | | | [mC][mA][mU][fU][mC][mU][mU][mG][mG] | |
| | | | [mGs][mGs][mG] | |
| STAT3- | Modified 22 | Hs | [MePhosphonate-4O- | 1190 |
| 1388 | mer | | mUs][fAs][fU][fU][fC][mU][fU][mC][mC][fA] | |
| | | | [mU][mG][mU][fU][mC][mA][mU][mC][mA] | |
| | | | [mCs][mGs][mG] | |
| STAT3- | Modified 22 | Hs | [MePhosphonate-4O- | 1191 |
| 0429 | mer | | mUs][fUs][fA][fG][fA][mG][fA][mA][mC][fA] | |
| | | | [mU][mU][mC][fG][mA][mC][mU][mC][mU] | |
| | | | [mUs][mGs][mG] | |
| STAT3- | Modified 22 | Hs | [MePhosphonate-4O- | 1192 |
| 2405 | mer | | mUs][fCs][fA][fA][fA][mC][fU][mG][mC][fA] | |
| | | | [mU][mC][mA][fA][mU][mG][mA][mA][mU] | |
| | | | [mCs][mGs][mG] | |
| STAT3- | Modified 22 | Hs | [MePhosphonate-4O- | 1193 |
| 0430 | mer | | mUs][fAs][fU][fA][fG][mA][fG][mA][mA][fC] | |
| | | | [mA][mU][mU][fC][mG][mA][mC][mU][mC] | |
| | | | [mUs][mGs][mG] | |
| STAT3- | Modified 22 | Hs | [MePhosphonate-4O- | 1194 |
| 0432 | mer | | mUs][fUs][fG][fA][fU][mA][fG][mA][mG][fA] | |
| | | | [mA][mC][mA][fU][mU][mC][mG][mA][mC] | |
| | | | [mUs][mGs][mG] | |
| STAT3- | Modified 22 | Hs | [MePhosphonate-4O- | 1195 |
| 1815 | mer | | mUs][fCs][fC][fU][fG][mA][fA][mU][mA][fA] | |
| | | | [mU][mU][mC][fA][mC][mA][mC][mC][mA] | |
| | | | [mGs][mGs][mG] | |
| STAT3- | Modified 22 | Hs | [MePhosphonate-4O- | 1196 |
| 0424 | mer | | mUs][fAs][fA][fC][fA][mU][fU][mC][mG][fA] | |
| | | | [mC][mU][mC][fU][mU][mG][mC][mA][mG] | |
| | | | [mGs][mGs][mG] | |
| STAT3- | Modified 22 | Hs | [MePhosphonate-4O- | 1197 |
| 2024 | mer | | mUs][fUs][fG][fA][fA][mU][fC][mU][mU][fA] | |
| | | | [mG][mC][mA][fG][mG][mA][mA][mG][mG] | |
| | | | [mUs][mGs][mG] | |
| STAT3- | Modified 22 | Hs | [MePhosphonate-4O- | 1198 |
| 1813 | mer | | mUs][fUs][fG][fA][fA][mU][fA][mA][mU][fU] | |
| | | | [mC][mA][mC][fA][mC][mC][mA][mG][mG] | |
| | | | [mUs][mGs][mG] | |
| STAT3- | Modified 22 | Hs | [MePhosphonate-4O- | 1199 |
| 1674 | mer | | mUs][fGs][fU][fA][fA][mA][fA][mA][mA][fG] | |
| | | | [mU][mU][mU][fA][mC][mA][mU][mU][mC] | |
| | | | [mUs][mGs][mG] | |
| STAT3- | Modified 22 | Hs | [MePhosphonate-4O- | 1200 |
| 1241 | mer | | mUs][fUs][fG][fA][fC][mU][fU][mU][mA][fG] | |
| | | | [mU][mA][mG][fU][mG][mA][mA][mC][mU] | |
| | | | [mGs][mGs][mG] | |
| STAT3- | Modified 22 | Hs | [MePhosphonate-4O- | 1201 |
| 1672 | mer | | mUs][fUs][fG][fA][fC][mU][fU][mU][mA][fG] | |
| | | | [mU][mA][mG][fU][mG][mA][mA][mC][mU] | |
| | | | [mGs][mGs][mG] | |
| STAT3- | Modified 22 | Hs | [MePhosphonate-4O- | 1202 |
| 0425 | mer | | mUs][fGs][fA][fA][fC][mA][fU][mU][mC][fG] | |
| | | | [mA][mC][mU][fC][mU][mU][mG][mC][mA] | |
| | | | [mGs][mGs][mG] | |
| STAT3- | Modified 22 | Hs | [MePhosphonate-4O- | 1203 |
| 1817 | mer | | mUs][fAs][fC][fC][fC][mU][fG][mA][mA][fU] | |
| | | | [mA][mA][mU][fU][mC][mA][mC][mA][mC] | |
| | | | [mCs][mGs][mG] | |
| STAT3- | Modified 22 | Hs | [MePhosphonate-4O- | 1204 |
| 1671 | mer | | mUs][fAs][fA][fA][fA][mA][fG][mU][mU][fU] | |
| | | | [mA][mC][mA][fU][mU][mC][mU][mU][mG] | |
| | | | [mGs][mGs][mG] | |
| STAT3- | Modified 22 | Hs-Mm | [MePhosphonate-4O- | 1205 |
| 2136 | mer | | mUs][fAs][fU][fG][fU][mU][fG][mU][mU][fC] | |
| | | | [mA][mG][mC][fU][mG][mC][mU][mG][mC] | |
| | | | [mUs][mGs][mG] | |
| STAT3- | Modified 22 | Hs-Mm | [MePhosphonate-4O- | 1206 |
| 2143 | mer | | mUs][fAs][fA][fA][fU][mG][fA][mC][mA][fU] | |
| | | | [mG][mU][mU][fG][mU][mU][mC][mA][mG] | |
| | | | [mCs][mGs][mG] | |
| STAT3- | Modified 22 | Hs-Mm | [MePhosphonate-4O- | 1207 |
| 2144 | mer | | mUs][fCs][fA][fA][fA][mU][fG][mA][mC][fA] | |
| | | | [mU][mG][mU][fU][mG][mU][mU][mC][mA] | |
| | | | [mGs][mGs][mG] | |
| STAT3- | Modified 22 | Hs-Mm | [MePhosphonate-4O- | 1208 |
| 2138 | mer | | mUs][fAs][fC][fA][fU][mG][fU][mU][mG][fU] | |
| | | | [mU][mC][mA][fG][mC][mU][mG][mC][mU] | |
| | | | [mGs][mGs][mG] | |
| STAT3- | Modified 22 | Hs-Mm | [MePhosphonate-4O- | 1209 |
| 4909 | mer | | mUs][fUs][fU][fU][fA][mU][fU][mU][mC][fU] | |
| | | | [mG][mG][mA][fA][mG][mU][mU][mA][mA] | |
| | | | [mAs][mGs][mG] | |
| STAT3- | Modified 22 | Hs-Mm | [MePhosphonate-4O- | 1210 |
| 2139 | mer | | mUs][fGs][fA][fC][fA][mU][fG][mU][mU][fG] | |
| | | | [mU][mU][mC][fA][mG][mC][mU][mG][mC] | |
| | | | [mUs][mGs][mG] | |
| STAT3- | Modified 22 | Hs-Mm | [MePhosphonate-4O- | 1211 |
| 2411 | mer | | mUs][fUs][fA][fU][fU][mU][fC][mC][mA][fA] | |
| | | | [mA][mC][mU][fG][mC][mA][mU][mC][mA] | |
| | | | [mAs][mGs][mG] | |
| STAT3- | Modified 22 | Hs-Mm | [MePhosphonate-4O- | 1212 |
| 2145 | mer | | mUs][fGs][fC][fA][fA][mA][fU][mG][mA][fC] | |
| | | | [mA][mU][mG][fU][mU][mG][mU][mU][mC] | |
| | | | [mAs][mGs][mG] | |
| STAT3- | Modified 22 | Hs-Mm | [MePhosphonate-4O- | 1213 |
| 4831 | mer | | mUs][fAs][fA][fU][fA][mU][fA][mA][mA][fU] | |
| | | | [mU][mU][mU][fU][mA][mC][mA][mC][mU] | |
| | | | [mAs][mGs][mG] | |
| STAT3- | Modified 22 | Hs-Mm | [MePhosphonate-4O- | 1214 |
| 2622 | mer | | mUs][fAs][fU][fC][fU][mG][fG][mA][mA][fC] | |
| | | | [mC][mA][mC][fA][mA][mA][mG][mU][mU] | |
| | | | [mAs][mGs][mG] | |
| STAT3- | Modified 22 | Hs-Mm | [MePhosphonate-4O- | 1215 |
| 2135 | mer | | mUs][fUs][fG][fU][fU][mG][fU][mU][mC][fA] | |
| | | | [mG][mC][mU][fG][mC][mU][mG][mC][mU] | |
| | | | [mUs][mGs][mG] | |
| STAT3- | Modified 22 | Hs-Mm | [MePhosphonate-4O- | 1216 |
| 1383 | mer | | mUs][fUs][fG][fU][fU][mG][fU][mU][mC][fA] | |
| | | | [mG][mC][mU][fG][mC][mU][mG][mC][mU] | |
| | | | [mUs][mGs][mG] | |
| NM_139276.3 | | | GTCGCAGCCGAGGGAACAAGCCCCAACC | 1217 |
| human | | | GGATCCTGGACAGGCACCCCGGCTTGGC | |
| STAT3 | | | GCTGTCTCTCCCCCTCGGCTCGGAGAGGC | |
| nucleotide | | | CCTTCGGCCTGAGGGAGCCTCGCCGCCC | |
| sequence | | | GTCCCCGGCACACGCGCAGCCCCGGCCT | |
| | | | CTCGGCCTCTGCCGGAGAAACAGTTGGG | |
| | | | ACCCCTGATTTTAGCAGGATGGCCCAATG | |
| | | | GAATCAGCTACAGCAGCTTGACACACGG | |
| | | | TACCTGGAGCAGCTCCATCAGCTCTACAG | |
| | | | TGACAGCTTCCCAATGGAGCTGCGGCAG | |
| | | | TTTCTGGCCCCTTGGATTGAGAGTCAAGA | |
| | | | TTGGGCATATGCGGCCAGCAAAGAATCA | |
| | | | CATGCCACTTTGGTGTTTCATAATCTCCT | |
| | | | GGGAGAGATTGACCAGCAGTATAGCCGC | |
| | | | TTCCTGCAAGAGTCGAATGTTCTCTATCA | |
| | | | GCACAATCTACGAAGAATCAAGCAGTTT | |
| | | | CTTCAGAGCAGGTATCTTGAGAAGCCAA | |
| | | | TGGAGATTGCCCGGATTGTGGCCCGGTG | |
| | | | CCTGTGGGAAGAATCACGCCTTCTACAG | |
| | | | ACTGCAGCCACTGCGGCCCAGCAAGGGG | |
| | | | GCCAGGCCAACCACCCCACAGCAGCCGT | |
| | | | GGTGACGGAGAAGCAGCAGATGCTGGAG | |
| | | | CAGCACCTTCAGGATGTCCGGAAGAGAG | |
| | | | TGCAGGATCTAGAACAGAAAATGAAAGT | |
| | | | GGTAGAGAATCTCCAGGATGACTTTGATT | |
| | | | TCAACTATAAAACCCTCAAGAGTCAAGG | |
| | | | AGACATGCAAGATCTGAATGGAAACAAC | |
| | | | CAGTCAGTGACCAGGCAGAAGATGCAGC | |
| | | | AGCTGGAACAGATGCTCACTGCGCTGGA | |
| | | | CCAGATGCGGAGAAGCATCGTGAGTGAG | |
| | | | CTGGCGGGGCTTTTGTCAGCGATGGAGT | |
| | | | ACGTGCAGAAAACTCTCACGGACGAGGA | |
| | | | GCTGGCTGACTGGAAGAGGCGGCAACAG | |
| | | | ATTGCCTGCATTGGAGGCCCGCCCAACAT | |
| | | | CTGCCTAGATCGGCTAGAAAACTGGATA | |
| | | | ACGTCATTAGCAGAATCTCAACTTCAGAC | |
| | | | CCGTCAACAAATTAAGAAACTGGAGGAG | |
| | | | TTGCAGCAAAAAGTTTCCTACAAAGGGG | |
| | | | ACCCCATTGTACAGCACCGGCCGATGCT | |
| | | | GGAGGAGAGAATCGTGGAGCTGTTTAGA | |
| | | | AACTTAATGAAAAGTGCCTTTGTGGTGG | |
| | | | AGCGGCAGCCCTGCATGCCCATGCATCCT | |
| | | | GACCGGCCCCTCGTCATCAAGACCGGCG | |
| | | | TCCAGTTCACTACTAAAGTCAGGTTGCTG | |
| | | | GTCAAATTCCCTGAGTTGAATTATCAGCT | |
| | | | TAAAATTAAAGTGTGCATTGACAAAGAC | |
| | | | TCTGGGGACGTTGCAGCTCTCAGAGGAT | |
| | | | CCCGGAAATTTAACATTCTGGGCACAAA | |
| | | | CACAAAAGTGATGAACATGGAAGAATCC | |
| | | | AACAACGGCAGCCTCTCTGCAGAATTCA | |
| | | | AACACTTGACCCTGAGGGAGCAGAGATG | |
| | | | TGGGAATGGGGGCCGAGCCAATTGTGAT | |
| | | | GCTTCCCTGATTGTGACTGAGGAGCTGCA | |
| | | | CCTGATCACCTTTGAGACCGAGGTGTATC | |
| | | | ACCAAGGCCTCAAGATTGACCTAGAGAC | |
| | | | CCACTCCTTGCCAGTTGTGGTGATCTCCA | |
| | | | ACATCTGTCAGATGCCAAATGCCTGGGC | |
| | | | GTCCATCCTGTGGTACAACATGCTGACCA | |
| | | | ACAATCCCAAGAATGTAAACTTTTTTACC | |
| | | | AAGCCCCCAATTGGAACCTGGGATCAAG | |
| | | | TGGCCGAGGTCCTGAGCTGGCAGTTCTCC | |
| | | | TCCACCACCAAGCGAGGACTGAGCATCG | |
| | | | AGCAGCTGACTACACTGGCAGAGAAACT | |
| | | | CTTGGGACCTGGTGTGAATTATTCAGGGT | |
| | | | GTCAGATCACATGGGCTAAATTTTGCAA | |
| | | | AGAAAACATGGCTGGCAAGGGCTTCTCC | |
| | | | TTCTGGGTCTGGCTGGACAATATCATTGA | |
| | | | CCTTGTGAAAAAGTACATCCTGGCCCTTT | |
| | | | GGAACGAAGGGTACATCATGGGCTTTAT | |
| | | | CAGTAAGGAGCGGGAGCGGGCCATCTTG | |
| | | | AGCACTAAGCCTCCAGGCACCTTCCTGCT | |
| | | | AAGATTCAGTGAAAGCAGCAAAGAAGGA | |
| | | | GGCGTCACTTTCACTTGGGTGGAGAAGG | |
| | | | ACATCAGCGGTAAGACCCAGATCCAGTC | |
| | | | CGTGGAACCATACACAAAGCAGCAGCTG | |
| | | | AACAACATGTCATTTGCTGAAATCATCAT | |
| | | | GGGCTATAAGATCATGGATGCTACCAAT | |
| | | | ATCCTGGTGTCTCCACTGGTCTATCTCTA | |
| | | | TCCTGACATTCCCAAGGAGGAGGCATTC | |
| | | | GGAAAGTATTGTCGGCCAGAGAGCCAGG | |
| | | | AGCATCCTGAAGCTGACCCAGGTAGCGC | |
| | | | TGCCCCATACCTGAAGACCAAGTTTATCT | |
| | | | GTGTGACACCAACGACCTGCAGCAATAC | |
| | | | CATTGACCTGCCGATGTCCCCCCGCACTT | |
| | | | TAGATTCATTGATGCAGTTTGGAAATAAT | |
| | | | GGTGAAGGTGCTGAACCCTCAGCAGGAG | |
| | | | GGCAGTTTGAGTCCCTCACCTTTGACATG | |
| | | | GAGTTGACCTCGGAGTGCGCTACCTCCCC | |
| | | | CATGTGAGGAGCTGAGAACGGAAGCTGC | |
| | | | AGAAAGATACGACTGAGGCGCCTACCTG | |
| | | | CATTCTGCCACCCCTCACACAGCCAAACC | |
| | | | CCAGATCATCTGAAACTACTAACTTTGTG | |
| | | | GTTCCAGATTTTTTTTAATCTCCTACTTCT | |
| | | | GCTATCTTTGAGCAATCTGGGCACTTTTA | |
| | | | AAAATAGAGAAATGAGTGAATGTGGGTG | |
| | | | ATCTGCTTTTATCTAAATGCAAATAAGGA | |
| | | | TGTGTTCTCTGAGACCCATGATCAGGGGA | |
| | | | TGTGGCGGGGGGTGGCTAGAGGGAGAAA | |
| | | | AAGGAAATGTCTTGTGTTGTTTTGTTCCC | |
| | | | CTGCCCTCCTTTCTCAGCAGCTTTTTGTTA | |
| | | | TTGTTGTTGTTGTTCTTAGACAAGTGCCT | |
| | | | CCTGGTGCCTGCGGCATCCTTCTGCCTGT | |
| | | | TTCTGTAAGCAAATGCCACAGGCCACCT | |
| | | | ATAGCTACATACTCCTGGCATTGCACTTT | |
| | | | TTAACCTTGCTGACATCCAAATAGAAGAT | |
| | | | AGGACTATCTAAGCCCTAGGTTTCTTTTT | |
| | | | AAATTAAGAAATAATAACAATTAAAGGG | |
| | | | CAAAAAACACTGTATCAGCATAGCCTTTC | |
| | | | TGTATTTAAGAAACTTAAGCAGCCGGGC | |
| | | | ATGGTGGCTCACGCCTGTAATCCCAGCAC | |
| | | | TTTGGGAGGCCGAGGCGGATCATAAGGT | |
| | | | CAGGAGATCAAGACCATCCTGGCTAACA | |
| | | | CGGTGAAACCCCGTCTCTACTAAAAGTA | |
| | | | CAAAAAATTAGCTGGGTGTGGTGGTGGG | |
| | | | CGCCTGTAGTCCCAGCTACTCGGGAGGCT | |
| | | | GAGGCAGGAGAATCGCTTGAACCTGAGA | |
| | | | GGCGGAGGTTGCAGTGAGCCAAAATTGC | |
| | | | ACCACTGCACACTGCACTCCATCCTGGGC | |
| | | | GACAGTCTGAGACTCTGTCTCAAAAAAA | |
| | | | AAAAAAAAAAAAAGAAACTTCAGTTAAC | |
| | | | AGCCTCCTTGGTGCTTTAAGCATTCAGCT | |
| | | | TCCTTCAGGCTGGTAATTTATATAATCCC | |
| | | | TGAAACGGGCTTCAGGTCAAACCCTTAA | |
| | | | GACATCTGAAGCTGCAACCTGGCCTTTGG | |
| | | | TGTTGAAATAGGAAGGTTTAAGGAGAAT | |
| | | | CTAAGCATTTTAGACTTTTTTTTATAAAT | |
| | | | AGACTTATTTTCCTTTGTAATGTATTGGC | |
| | | | CTTTTAGTGAGTAAGGCTGGGCAGAGGG | |
| | | | TGCTTACAACCTTGACTCCCTTTCTCCCT | |
| | | | GGACTTGATCTGCTGTTTCAGAGGCTAGG | |
| | | | TTGTTTCTGTGGGTGCCTTATCAGGGCTG | |
| | | | GGATACTTCTGATTCTGGCTTCCTTCCTG | |
| | | | CCCCACCCTCCCGACCCCAGTCCCCCTGA | |
| | | | TCCTGCTAGAGGCATGTCTCCTTGCGTGT | |
| | | | CTAAAGGTCCCTCATCCTGTTTGTTTTAG | |
| | | | GAATCCTGGTCTCAGGACCTCATGGAAG | |
| | | | AAGAGGGGGAGAGAGTTACAGGTTGGAC | |
| | | | ATGATGCACACTATGGGGCCCCAGCGAC | |
| | | | GTGTCTGGTTGAGCTCAGGGAATATGGTT | |
| | | | CTTAGCCAGTTTCTTGGTGATATCCAGTG | |
| | | | GCACTTGTAATGGCGTCTTCATTCAGTTC | |
| | | | ATGCAGGGCAAAGGCTTACTGATAAACT | |
| | | | TGAGTCTGCCCTCGTATGAGGGTGTATAC | |
| | | | CTGGCCTCCCTCTGAGGCTGGTGACTCCT | |
| | | | CCCTGCTGGGGCCCCACAGGTGAGGCAG | |
| | | | AACAGCTAGAGGGCCTCCCCGCCTGCCC | |
| | | | GCCTTGGCTGGCTAGCTCGCCTCTCCTGT | |
| | | | GCGTATGGGAACACCTAGCACGTGCTGG | |
| | | | ATGGGCTGCCTCTGACTCAGAGGCATGG | |
| | | | CCGGATTTGGCAACTCAAAACCACCTTGC | |
| | | | CTCAGCTGATCAGAGTTTCTGTGGAATTC | |
| | | | TGTTTGTTAAATCAAATTAGCTGGTCTCT | |
| | | | GAATTAAGGGGGAGACGACCTTCTCTAA | |
| | | | GATGAACAGGGTTCGCCCCAGTCCTCCTG | |
| | | | CCTGGAGACAGTTGATGTGTCATGCAGA | |
| | | | GCTCTTACTTCTCCAGCAACACTCTTCAG | |
| | | | TACATAATAAGCTTAACTGATAAACAGA | |
| | | | ATATTTAGAAAGGTGAGACTTGGGCTTA | |
| | | | CCATTGGGTTTAAATCATAGGGACCTAG | |
| | | | GGCGAGGGTTCAGGGCTTCTCTGGAGCA | |
| | | | GATATTGTCAAGTTCATGGCCTTAGGTAG | |
| | | | CATGTATCTGGTCTTAACTCTGATTGTAG | |
| | | | CAAAAGTTCTGAGAGGAGCTGAGCCCTG | |
| | | | TTGTGGCCCATTAAAGAACAGGGTCCTC | |
| | | | AGGCCCTGCCCGCTTCCTGTCCACTGCCC | |
| | | | CCTCCCCATCCCCAGCCCAGCCGAGGGA | |
| | | | ATCCCGTGGGTTGCTTACCTACCTATAAG | |
| | | | GTGGTTTATAAGCTGCTGTCCTGGCCACT | |
| | | | GCATTCAAATTCCAATGTGTACTTCATAG | |
| | | | TGTAAAAATTTATATTATTGTGAGGTTTT | |
| | | | TTGTCTTTTTTTTTTTTTTTTTTTTTTGGTA | |
| | | | TATTGCTGTATCTACTTTAACTTCCAGAA | |
| | | | ATAAACGTTATATAGGAACCGTC | |
| XM_005584240.2 | | | TGCATGACGGCGTGCCTCGGCCAGGCTG | 1218 |
| Non- | | | GGGCTGGGCGGGGATTGGCTGAAGGGGC | |
| human | | | TGTAATTCAGCGGTTTCCGGAGCTGCGGC | |
| primate | | | GGCGTAGACCGGGAGGGGGAGCCGGGG | |
| STAT3 | | | GTTCCGACGTAGCAGCCGAGGGAACAAG | |
| nucleotide | | | CCCCAACCGGATCCTGGACAGGCACCCC | |
| sequence | | | GGCTCGGCGCTGTCTCTCCCCCTCGGCTC | |
| | | | GGATAAGCCCTCCGGCCTGAGGGAGCCC | |
| | | | CGTCGCCCGCCCCCGGCGCACGCGCAGC | |
| | | | CCCGGCCTCTCGGCCTCTGCTGGAGAAAC | |
| | | | AGCAGGATGGCCCAATGGAATCAGCTAC | |
| | | | AGCAGCTTGACACACGGTACCTGGAGCA | |
| | | | GCTCCATCAGCTCTACAGTGACAGCTTCC | |
| | | | CAATGGAGTTGCGGCAGTTTCTGGCCCCT | |
| | | | TGGATTGAGAGTCAAGATTGGGCATATG | |
| | | | CGGCCAGCAAAGAATCACATGCCACTTT | |
| | | | GGTGTTTCATAATCTCCTGGGCGAGATTG | |
| | | | ACCAGCAGTATAGCCGCTTCCTGCAAGA | |
| | | | ATCGAATGTTCTCTATCAGCACAATCTAC | |
| | | | GAAGAATCAAGCAGTTTCTTCAGAGCAG | |
| | | | GTATCTTGAGAAGCCAATGGAGATTGCC | |
| | | | CGGATTGTGGCCCGGTGCCTGTGGGAAG | |
| | | | AGTCACGCCTCCTACAGACTGCAGCCACT | |
| | | | GCGGCCCAGCAAGGGGGCCAGGCCAACC | |
| | | | ACCCCACAGCAGCTGTGGTGACGGAGAA | |
| | | | GCAGCAGATGCTGGAGCAGCACCTTCAG | |
| | | | GATGTCCGGAAGAGAGTACAGGATCTAG | |
| | | | AACAGAAAATGAAAGTGGTAGAGAATCT | |
| | | | CCAGGATGACTTTGATTTCAACTATAAAA | |
| | | | CCCTCAAGAGTCAAGGAGACATGCAAGA | |
| | | | TCTGAATGGAAACAACCAGTCAGTGACC | |
| | | | AGGCAGAAGATGCAGCAGCTGGAACAGA | |
| | | | TGCTCACTGCGCTGGACCAGATGCGGAG | |
| | | | AAGCATCGTGAGTGAGCTGGCGGGGCTT | |
| | | | TTGTCAGCGATGGAGTACGTGCAGAAAA | |
| | | | CTCTCACAGACGAGGAGCTGGCTGACTG | |
| | | | GAAGAGGCGGCAACAGATTGCCTGCATT | |
| | | | GGAGGTCCGCCCAACATCTGCCTAGATC | |
| | | | GGCTAGAAAACTGGATAACGTCATTAGC | |
| | | | AGAATCTCAACTTCAGACCCGTCAACAA | |
| | | | ATTAAGAAACTGGAGGAGTTGCAGCAAA | |
| | | | AAGTGTCCTACAAAGGGGACCCCATTGT | |
| | | | ACAGCACCGGCCGATGCTGGAGGAGAGA | |
| | | | ATCGTGGAGCTGTTCAGAAACTTAATGA | |
| | | | AAAGTGCCTTTGTGGTGGAGCGGCAGCC | |
| | | | CTGCATGCCCATGCATCCCGACCGGCCCC | |
| | | | TTGTCATCAAGACCGGCGTCCAGTTCACT | |
| | | | ACCAAAGTCAGGTTGCTGGTCAAATTCCC | |
| | | | TGAGTTAAATTATCAACTTAAAATTAAAG | |
| | | | TGTGCATTGACAAAGACTCTGGGGATGTT | |
| | | | GCAGCTCTCAGAGGATCCCGGAAATTTA | |
| | | | ACATTCTGGGCACAAACACCAAAGTGAT | |
| | | | GAACATGGAAGAGTCCAACAACGGCAGC | |
| | | | CTCTCTGCAGAATTCAAACACTTGACCCT | |
| | | | GAGGGAGCAGAGATGTGGGAATGGGGG | |
| | | | CCGAGCCAATTGTGATGCTTCCCTGATTG | |
| | | | TGACTGAGGAGCTGCACCTGATCACCTTT | |
| | | | GAGACAGAGGTATATCACCAAGGCCTCA | |
| | | | AGATTGACCTAGAGACCCACTCCTTGCCA | |
| | | | GTTGTGGTGATCTCCAACATCTGTCAGAT | |
| | | | GCCAAATGCCTGGGCGTCCATCCTGTGGT | |
| | | | ACAACATGCTGACCAACAACCCCAAGAA | |
| | | | CGTAAACTTTTTTACCAAGCCCCCAATCG | |
| | | | GAACCTGGGATCAAGTGGCCGAGGTCCT | |
| | | | GAGCTGGCAGTTCTCCTCCACCACCAAGC | |
| | | | GAGGACTGAGCATCGAGCAGCTGACTAC | |
| | | | ACTGGCGGAGAAACTCTTGGGACCTGGC | |
| | | | GTGAATTATTCAGGGTGTCAGATCACATG | |
| | | | GGCTAAATTTTGCAAAGAAAACATGGCT | |
| | | | GGCAAGGGCTTCTCCTTCTGGGTCTGGCT | |
| | | | GGACAATATCATTGACCTTGTGAAAAAG | |
| | | | TACATCCTGGCCCTTTGGAATGAAGGGTA | |
| | | | CATCATGGGCTTTATCAGTAAGGAGCGG | |
| | | | GAGCGGGCCATCTTGAGCACCAAGCCTC | |
| | | | CAGGCACCTTTCTGCTAAGATTCAGTGAA | |
| | | | AGCAGCAAAGAAGGCGGCGTCACTTTCA | |
| | | | CTTGGGTGGAGAAGGACATCAGTGGTAA | |
| | | | GACCCAGATCCAGTCCGTGGAACCATAC | |
| | | | ACCAAGCAGCAGTTGAACAACATGTCAT | |
| | | | TTGCTGAAATCATCATGGGCTATAAGATC | |
| | | | ATGGATGCTACCAATATTCTGGTGTCTCC | |
| | | | GCTGGTCTATCTCTACCCTGACATTCCCA | |
| | | | AGGAGGAGGCATTCGGAAAGTATTGTCG | |
| | | | GCCAGAGAGCCAGGAGCATCCTGAAGCT | |
| | | | GACCCAGGCGCCGCCCCATACCTGAAGA | |
| | | | CCAAGTTTATCTGTGTGACACCATTCATT | |
| | | | GATGCAGTTTGGAAATAATGGTGAAGGT | |
| | | | GCTGAACCCTCAGCAGGAGGGCAGTTTG | |
| | | | AGTCCCTCACCTTTGACATGGAGTTGACC | |
| | | | TCGGAGTGTGCTACCTCCCCCATGTGAGG | |
| | | | AGCTGAGAACGGAAGCTGCAAAAGATAC | |
| | | | GACTGAGGCGCCTACCTGTGTTCCGCCAC | |
| | | | CCCTCACACAGCCAAACCCCAGATCATC | |
| | | | TGAAACTACTAACTTTGTGGTTCCAGATT | |
| | | | TTTTTTAATCTCCTACTTCTGCTATCTTTG | |
| | | | AGCAATCTGGGCACTTTTAAAAATAAGA | |
| | | | GAAATGAGTGAATGTGGGTGATCTGCTTT | |
| | | | TATCTAAATGCAAATAAGGATGTGTTCTC | |
| | | | TGAGACCCGTGATGGGGGGATGTGGCGG | |
| | | | GGGGTGGCTAGAGGGAGAAAAAGGAAA | |
| | | | TGTCTTGTGTTGTTTTGTTCCCCTGCCCTC | |
| | | | CTTTCTCAGCAGCTTTTTGTTATTGTTGTT | |
| | | | GTTGTTCTTAGACAAGTGCCTCCTGGTGC | |
| | | | CCGCGGCATCCTTCTGCCTGTTTCTGTAA | |
| | | | GCAAATGCCACAGGCCACCTGTAGCTAC | |
| | | | ATACTCCTGGCATTGCACTTTTTAACCTT | |
| | | | GCTGACATCCAAATAGAAGATAGGACTA | |
| | | | TCTGAGCCCTAGGTTTCTTTTTAAATTAA | |
| | | | GAAATAAGAACAATTAAAGGGCAAAAA | |
| | | | ACACTGTTTCAGCATAGCCTTTCTGTATT | |
| | | | TAAGAAACTTCAGCAGCCGGCCGCAGGG | |
| | | | ACTCACGCCTGTAATCCCAGCACTTTGGG | |
| | | | AGGCCGAGGTGGGTGGATCATGAGGTTA | |
| | | | GGAGATCAAGACTGTCCTGGCTAACATG | |
| | | | GTGAAACCCCGTCTCTACTAACAGTACA | |
| | | | AAAAATTAGCCGGGCGTGGTGGTGGGTG | |
| | | | CCTGTAGTCCCAGCTACTCGGGAGGCTG | |
| | | | AGGCAGGAGAATGGCATGAACCCAAGAG | |
| | | | GCGGAGGTTGCAGTGAGCCAAAATCACA | |
| | | | CCACTGCACTCCAACTCAGGCAACAGTG | |
| | | | TGAGACTCCATCTCAAAAAAAAAAGAAA | |
| | | | AGAAAAAGAAACTTCAGTTAACAGCCTC | |
| | | | CTTGGTGCTTTAAGCATTCAGCTTCCTTC | |
| | | | AGGTTGATAATTTATATAACCCCTGAAAC | |
| | | | AGGCTTCAGGTCAAACCCTTAAAAGACG | |
| | | | TCTGAAGCTGCAGCCTGGCCTTTGATGTT | |
| | | | GAAATAGGAAGGTTTAAGGAGAATCTAA | |
| | | | GCATTTTAGACTTTTTTTTATAAATAGAC | |
| | | | TTCTATTTTCCTTTGTAATGTATTGGTCTT | |
| | | | TTAGTGGGTAAGGCTGGGCAGAGGGTGC | |
| | | | TTACAACCTTGACTCCCTTTCTCCCTGGA | |
| | | | CTTGATCTGCTGTTTCAGAGGCTAGGTTG | |
| | | | TTTCTGTGGGTGCCTTATCAGGGCTGGGA | |
| | | | TACTTCTGATTTGGGCTTCCTTCTTGCCCC | |
| | | | ACCCTCCCGACCCCAGTTCCCCTGACCCT | |
| | | | GCTAGTGGCATGTCTCCTCCCATGTCTGA | |
| | | | AGGTCCCTCGTCCTGTTTGTTTTAGGAAT | |
| | | | CCTGGTCTCAGGACCTCATGGAAGAAGA | |
| | | | GGGGGAGAAAGTTACCAGTTGGATATGA | |
| | | | TGCAGACTATGGGGCCCCAGCGACGTGT | |
| | | | CTGGTTGAGCTCAGGGAATATGGTTCTTA | |
| | | | GCCCAGTTTCTTGGTGATTTCCAGCGGTC | |
| | | | AGTTCAGGCAGGGCAAAGGCTTACTGAT | |
| | | | AAACTTGAGTCTGCCCTCGTATGAGGGTT | |
| | | | ATAGCTGGCCTCCCTCTGAGGCTGGTGAC | |
| | | | TCTTCCCTGCTGGGGCCCCACAGGTGAGA | |
| | | | CAGAACAGGTAGAGGGCCTCCCTGTCTG | |
| | | | CCCGCCTTGGCCAGCTAGCTTGCCTCTCC | |
| | | | TGTGCGTATGGGAACACCTAGCACGTGC | |
| | | | TGGGTGGGCTGCCTCTGACCCAGAGGCA | |
| | | | TGGCCGAATTTGGCGACTCAAAACCACC | |
| | | | TTGCCTCAGCTGATCAGAGTTTCTGTGGA | |
| | | | ATTCTGATTGTTAGATCAAATTAGCTGGC | |
| | | | CTCTGAATTAAGTGGGAGAGGACCTTCTC | |
| | | | TAAGATGAACCGGGTTCGCCCCAGTCCTC | |
| | | | CTGCCTGGAGACAGTTGATGTGTCTTGCA | |
| | | | GAGCTCTCGCTTCCCCAGCAACACTCTTC | |
| | | | AGTACATAATAAGCTTAACTGATAAACA | |
| | | | GAGAGAATATTTAGGAAGGTGAGTCTTG | |
| | | | GGCTTACCATTGGGTTTAAATCATAGGGA | |
| | | | CCTCGGGAAAGGGTTCGGGCTTCTCTGG | |
| | | | AGCAGATATTATGAAGTTCATGGCCTTAG | |
| | | | GTAGCATGTGTATCTGGTCTTAACTCTGA | |
| | | | TTGTAGCAAAAGTTCTGAGAGGAGCTGA | |
| | | | GCCTTGTTCTGGCCCCTTAAAGAACAGGG | |
| | | | TCCTCAGGCCCTGCCCGCTTCCTGTCCAC | |
| | | | TGCCCTCCTGCCCGTCCCCAGCCCAGCTG | |
| | | | AGGGAATCCCGTGGGTTGCTTACCTACCT | |
| | | | ATAAGGTGGTTTATAAGCTGCTGTCCTGG | |
| | | | CCACTGCATTCAAATTCCAATGTGTACTT | |
| | | | CATAGTGTAAAAATTTATATTATTGTGGG | |
| | | | GTTTTTTGTCTTTTTTTTTTTTTTTTTTTTG | |
| | | | GTATATTGCTGTATCTACTTTAACTTCCA | |
| | | | GAAATAAACGTTATATAGGAACCGTC | |
| Forward | | | TTGTGTTTGTGCCCAGAATG | 1219 |
| 1 | | | | |
| Reverse | | | TCCCTGAGTTGAATTATCAGCTT | 1220 |
| 1 | | | | |
| Probe 1 | | | /56- | 1221 |
| | | | FAM/ACGTCCCCA/ZEN/GAGTCTTTGTCA | |
| | | | ATGC/3IABKFQ/ | |
| Forward | | | GATGATTTCAGCAAATGACATGTTG | 1222 |
| 2 | | | | |
| Reverse | | | CAGTGAAAGCAGCAAAGAAGG | 1223 |
| 2 | | | | |
| Probe 2 | | | /56- | 1224 |
| | | | FAM/AGGACATCA/ZEN/GCGGTAAGACCC | |
| | | | AGA/3IABKFQ/ | |
| STAT3- | Modified | | [MePhosphonate-4O- | 1225 |
| 721 | 22 mer | | mUs][fAs][fU][fA][fG][mU][fU][mG][mA][fA] | |
| | | | [mA][mU][mC][fA][mA][mA][mG][mU][mC] | |
| | | | [mAs][mGs][mG] | |
| STAT3- | Modified | | [MePhosphonate-4O- | 1226 |
| 1286 | 22 mer | | mUs][fUs][fA][fA][fU][mU][fU][mU][mA][A] | |
| | | | [mG][mC][mU][fG][mA][mU][mA][mA][mU] | |
| | | | [mUs][mGs][mG] | |
| STAT3- | Modified | | [MePhosphonate-4O- | 1227 |
| 1287 | 22 mer | | mUs][fUs][fU][fA][fA][mU][fU][mU][mU][fA] | |
| | | | [mA][mG][mC][fU][mG][mA][mU][mA][mA] | |
| | | | [mUs][mGs][mG] | |
| STAT3- | Modified | | [MePhosphonate-4O- | 1228 |
| 1388 | 22 mer | | mUs][fAs][fUs][fU][fC][mU][fU][mC][mC][fA] | |
| | | | [mU][mG][mU][fU][mC][mA][mU][mC][mA] | |
| | | | [mCs][mGs][mG] | |
| NM_213659.3 | | | AATTATGCATGGAGGCGTGTCTTGGCCA | 1229 |
| Mus | | | GTGGCGGCTGGGTGGGGATTGGCTGGAG | |
| musculus | | | GGGCTGTAATTCAGCGGTTTCCGGAGCTG | |
| STAT3 | | | CAGTGTAGACAGGGAGGGGGAACCTGGG | |
| nucleotide | | | GTTCCGACGTCGCGGCGGAGGGAACGAG | |
| sequence | | | CCCTAACCGGATCGCTGAGGTACAACCC | |
| | | | CGCTCGGTGTCGCCTGACCGCGTCGGCTA | |
| | | | GGAGAGGCCAGGCGGCCCTCGGGAGCCC | |
| | | | AGCAGCTCGCGCCTGGAGTCAGCGCAGG | |
| | | | CCGGCCAGTCGGGCCTCAGCCCCGGAGA | |
| | | | CAGTCGAGACCCCTGACTGCAGCAGGAT | |
| | | | GGCTCAGTGGAACCAGCTGCAGCAGCTG | |
| | | | GACACACGCTACCTGGAGCAGCTGCACC | |
| | | | AGCTGTACAGCGACAGCTTCCCCATGGA | |
| | | | GCTGCGGCAGTTCCTGGCACCTTGGATTG | |
| | | | AGAGTCAAGACTGGGCATATGCAGCCAG | |
| | | | CAAAGAGTCACATGCCACGTTGGTGTTTC | |
| | | | ATAATCTCTTGGGTGAAATTGACCAGCA | |
| | | | ATATAGCCGATTCCTGCAAGAGTCCAAT | |
| | | | GTCCTCTATCAGCACAACCTTCGAAGAAT | |
| | | | CAAGCAGTTTCTGCAGAGCAGGTATCTTG | |
| | | | AGAAGCCAATGGAAATTGCCCGGATCGT | |
| | | | GGCCCGATGCCTGTGGGAAGAGTCTCGC | |
| | | | CTCCTCCAGACGGCAGCCACGGCAGCCC | |
| | | | AGCAAGGGGGCCAGGCCAACCACCCAAC | |
| | | | AGCCGCCGTAGTGACAGAGAAGCAGCAG | |
| | | | ATGTTGGAGCAGCATCTTCAGGATGTCCG | |
| | | | GAAGCGAGTGCAGGATCTAGAACAGAAA | |
| | | | ATGAAGGTGGTGGAGAACCTCCAGGACG | |
| | | | ACTTTGATTTCAACTACAAAACCCTCAAG | |
| | | | AGCCAAGGAGACATGCAGGATCTGAATG | |
| | | | GAAACAACCAGTCTGTGACCAGACAGAA | |
| | | | GATGCAGCAGCTGGAACAGATGCTCACA | |
| | | | GCCCTGGACCAGATGCGGAGAAGCATTG | |
| | | | TGAGTGAGCTGGCGGGGCTCTTGTCAGC | |
| | | | AATGGAGTACGTGCAGAAGACACTGACT | |
| | | | GATGAAGAGCTGGCTGACTGGAAGAGGC | |
| | | | GGCAGCAGATCGCGTGCATCGGAGGCCC | |
| | | | TCCCAACATCTGCCTGGACCGTCTGGAAA | |
| | | | ACTGGATAACTTCATTAGCAGAATCTCAA | |
| | | | CTTCAGACCCGCCAACAAATTAAGAAAC | |
| | | | TGGAGGAGCTGCAGCAGAAAGTGTCCTA | |
| | | | CAAGGGCGACCCTATCGTGCAGCACCGG | |
| | | | CCCATGCTGGAGGAGAGGATCGTGGAGC | |
| | | | TGTTCAGAAACTTAATGAAGAGTGCCTTC | |
| | | | GTGGTGGAGCGGCAGCCCTGCATGCCCA | |
| | | | TGCACCCGGACCGGCCCTTAGTCATCAA | |
| | | | GACTGGTGTCCAGTTTACCACGAAAGTC | |
| | | | AGGTTGCTGGTCAAATTTCCTGAGTTGAA | |
| | | | TTATCAGCTTAAAATTAAAGTGTGCATTG | |
| | | | ATAAAGACTCTGGGGATGTTGCTGCCCTC | |
| | | | AGAGGGTCTCGGAAATTTAACATTCTGG | |
| | | | GCACGAACACAAAAGTGATGAACATGGA | |
| | | | GGAGTCTAACAACGGCAGCCTGTCTGCA | |
| | | | GAGTTCAAGCACCTGACCCTTAGGGAGC | |
| | | | AGAGATGTGGGAATGGAGGCCGTGCCAA | |
| | | | TTGTGATGCCTCCTTGATCGTGACTGAGG | |
| | | | AGCTGCACCTGATCACCTTCGAGACTGA | |
| | | | GGTGTACCACCAAGGCCTCAAGATTGAC | |
| | | | CTAGAGACCCACTCCTTGCCAGTTGTGGT | |
| | | | GATCTCCAACATCTGTCAGATGCCAAATG | |
| | | | CTTGGGCATCAATCCTGTGGTATAACATG | |
| | | | CTGACCAATAACCCCAAGAACGTGAACT | |
| | | | TCTTCACTAAGCCGCCAATTGGAACCTGG | |
| | | | GACCAAGTGGCCGAGGTGCTCAGCTGGC | |
| | | | AGTTCTCGTCCACCACCAAGCGGGGGCT | |
| | | | GAGCATCGAGCAGCTGACAACGCTGGCT | |
| | | | GAGAAGCTCCTAGGGCCTGGTGTGAACT | |
| | | | ACTCAGGGTGTCAGATCACATGGGCTAA | |
| | | | ATTCTGCAAAGAAAACATGGCTGGCAAG | |
| | | | GGCTTCTCCTTCTGGGTCTGGCTAGACAA | |
| | | | TATCATCGACCTTGTGAAAAAGTATATCT | |
| | | | TGGCCCTTTGGAATGAAGGGTACATCAT | |
| | | | GGGTTTCATCAGCAAGGAGCGGGAGCGG | |
| | | | GCCATCCTAAGCACAAAGCCCCCGGGCA | |
| | | | CCTTCCTACTGCGCTTCAGCGAGAGCAGC | |
| | | | AAAGAAGGAGGGGTCACTTTCACTTGGG | |
| | | | TGGAAAAGGACATCAGTGGCAAGACCCA | |
| | | | GATCCAGTCTGTAGAGCCATACACCAAG | |
| | | | CAGCAGCTGAACAACATGTCATTTGCTG | |
| | | | AAATCATCATGGGCTATAAGATCATGGA | |
| | | | TGCGACCAACATCCTGGTGTCTCCACTTG | |
| | | | TCTACCTCTACCCCGACATTCCCAAGGAG | |
| | | | GAGGCATTTGGAAAGTACTGTAGGCCCG | |
| | | | AGAGCCAGGAGCACCCCGAAGCCGACCC | |
| | | | AGGTAGTGCTGCCCCGTACCTGAAGACC | |
| | | | AAGTTCATCTGTGTGACACCAACGACCTG | |
| | | | CAGCAATACCATTGACCTGCCGATGTCCC | |
| | | | CCCGCACTTTAGATTCATTGATGCAGTTT | |
| | | | GGAAATAACGGTGAAGGTGCTGAGCCCT | |
| | | | CAGCAGGAGGGCAGTTTGAGTCGCTCAC | |
| | | | GTTTGACATGGATCTGACCTCGGAGTGTG | |
| | | | CTACCTCCCCCATGTGAGGAGCTGAAAC | |
| | | | CAGAAGCTGCAGAGACGTGACTTGAGAC | |
| | | | ACCTGCCCCGTGCTCCACCCCTAAGCAGC | |
| | | | CGAACCCCATATCGTCTGAAACTCCTAAC | |
| | | | TTTGTGGTTCCAGATTTTTTTTTTTAATTT | |
| | | | CCTACTTCTGCTATCTTTGGGCAATCTGG | |
| | | | GCACTTTTTAAAATAGAGAAATGAGTGA | |
| | | | GTGTGGGTGATAAACTGTTATGTAAAGA | |
| | | | GGAGAGCACCTCTGAGTCTGGGGATGGG | |
| | | | GCTGAGAGCAGAAGGGAGCAAGGGGAA | |
| | | | CACCTCCTGTCCTGCCCGCCTGCCCTCCT | |
| | | | TTTTCAGCAGCTCGGGGTTGGTTGTTAGA | |
| | | | CAAGTGCCTCCTGGTGCCCATGGCATCCT | |
| | | | GTTGCCCCACTCTGTGAGCTGATACCCCA | |
| | | | GGCTGGGAACTCCTGGCTCTGCACTTTCA | |
| | | | ACCTTGCTAATATCCACATAGAAGCTAG | |
| | | | GACTAAGCCCAGAGGTTCCTCTTTAAATT | |
| | | | AAAAAAAAAAAAAATAAGAATTAAAGG | |
| | | | GCAAAACACACTGACACAGCATAGCCTT | |
| | | | TCCATATCAAGGAATACTCAGTTAACAG | |
| | | | CCTCTCCAGCGCTGTCTTCAGGCTGATCA | |
| | | | TCTATATAAACCCTGGAATGGTTGCAGAT | |
| | | | CAAATCTGTAAAAGAGATCCGAGAGCTG | |
| | | | TGGCTTGGCCTCTGGTTCAAACACAAAG | |
| | | | GCTAGAGAGAACCTAGATATCCCTGGGT | |
| | | | TTTGTTTACCCAGTATGCTTGTCGGTTGG | |
| | | | AGGTGTGAGGTAGGCCAAGGGCACTGGA | |
| | | | AAGCCTTTGTCATCACCCTACTCCCTCCC | |
| | | | CAACCCAGACTCCAGACCCTGTTTCAGG | |
| | | | GTCAGCCTGCCCTGTGGGTGCCTTACTGG | |
| | | | GCCTAGGGTCAACCTGCCTTCCTTTCCCA | |
| | | | CTTGACCTTGCTGGTAGTATGTCCCCTTC | |
| | | | CCATGTCCAAAGGCCCTCTGTCCTGCTTC | |
| | | | TATTGGGAATCCCTGCCTCAGGACCTTGT | |
| | | | GTCGAGAGGGATTGCCTTACAGGTTTGA | |
| | | | ACCTGCCTCAGACTACAGGCCCTCAGCA | |
| | | | AAGCTCAGGGAGTATGGTCCTTATTCTAT | |
| | | | GCGCTTGGTTCCCAGGGATATCTGTAACC | |
| | | | ACAGGGCAAAAGCTGACATATACTCCAG | |
| | | | GTCTGCCCTCATATGAGTGGTGTATTCTT | |
| | | | GGCCTCCCCTGAGACTGGCAACTGTCTGC | |
| | | | TCCCCATTGGGTCTCCCAGGTGAGGTGGA | |
| | | | ACACAGTTCCTGCACCTACTGTGGCCTCC | |
| | | | ATGTCGCTTGCTTGCTTCGCTCACTCAGC | |
| | | | TTACTGGAACACTGAGTGTTCAAGGCAA | |
| | | | GCCTTTCCTGACAGAGGCATGGCTAGATT | |
| | | | CAGTGACTCAAAGCCACCTCATTCAGCTG | |
| | | | ATCAGTGTCTGTGGAATTGTTTCCTTCCA | |
| | | | GTTAACCAGTGTCTGAATTAAGGGCAGT | |
| | | | GAGGACATTGTCTCCAAGACGAACTGCT | |
| | | | TGCCTTGACCACCCCAGCCTTCTGCTTCG | |
| | | | AGACAGTTACTGCTCTCCCACCCCATCAA | |
| | | | TGTTCTTTAGTTATACAATAAGCTGAACT | |
| | | | TATAAACTGAAAGGGTATTTAGGAAGGC | |
| | | | AAGGCTTGGGCATTTTTATGGCTTTCAAT | |
| | | | CCTGGGGACCCAGGAACAAGGTGAGGGC | |
| | | | TTCTCTGGGGCTGGTGTTGTACCTCAGGG | |
| | | | GCTCTGGGAAGTCTGTGTGCCTGGGTTAA | |
| | | | CCACCCATAGTGAGCCCCTGGAACTGCC | |
| | | | CACTTTCCCTCTCCTTGGCCCCACTTGGC | |
| | | | CCCAGCCTCACCCAGCCTGCAGACTGCTT | |
| | | | AGCCTTTCAGTGCAGTGGCTTGTGTTCTG | |
| | | | GCCACTGCACTCAGATTCCAATGTAAACT | |
| | | | TTCTAGTGTAAAAATTTATATTATTGTGG | |
| | | | GTTGTTTTTTGTTGTTGTTTGTTTTTGTAT | |
| | | | ATTGCTGTAACTACTTTAACTTCCAGAAA | |
| | | | TAAAGATTATATAGGAACTGTCTGGC | |

1.-183. (canceled)

184. An oligonucleotide for reducing STAT3 expression, comprising an antisense strand comprising the nucleotide sequence of SEQ ID NO: 965 and a sense strand comprising the nucleotide sequence of SEQ ID NO: 875, wherein the sense strand comprises a saturated C18 hydrocarbon chain conjugated to the 5′ terminal nucleotide of the sense strand, and wherein each of the antisense and sense strands comprise at least one 2′-modified nucleotide and at least one modified internucleotide linkage.

185. The oligonucleotide of claim 184 comprising an antisense strand comprising the nucleotide sequence of SEQ ID NO: 1145 and a sense strand comprising the nucleotide sequence of SEQ ID NO: 1055.

186. The oligonucleotide of claim 184, wherein the sense strand comprises at its 3′ end a stem-loop set forth as: S1-L-S2, wherein 51 is complementary to S2, and wherein L forms a loop between 51 and S2 of 3 to 5 nucleotides in length.

187. The oligonucleotide of claim 186, wherein L is a tetraloop, optionally wherein L is 4 nucleotides in length.

188. The oligonucleotide of claim 186, wherein L comprises a sequence set forth as GAAA.

189. The oligonucleotide of claim 184, wherein the 2′-modification comprises 2′-aminoethyl, 2′-fluoro, 2′-O-methyl, 2′-O-methoxyethyl, or 2′-deoxy-2′-fluoro-β-d-arabinonucleic acid.

190. The oligonucleotide of claim 184, wherein the sense strand comprises 36 nucleotides with positions 1-36 from 5′ to 3′ and wherein:
a) one or more positions 8-11 comprise 2′-fluoro modification, preferably all positions 8-11 comprise 2′-fluoro modification; and/or
b) one or more positions 1-7, 12-36 comprise 2′-O-methyl modification, preferably all positions 1-7, 12-36 comprise 2′-O-methyl modification.

191. The oligonucleotide of claim 184, wherein the antisense strand comprises 22 nucleotides with positions 1-22 from 5′ to 3′, and wherein:
a) one or more positions 2, 3, 4, 5, 7, 10 and 14 comprise 2′-fluoro modification, preferably all positions 2, 3, 4, 5, 7, 10 and 14 comprise 2′-fluoro modification; and/or
b) one or more positions 1, 6, 8, 9, 11-13, 15-22 comprise 2′-O-methyl modification, preferably all positions 1, 6, 8, 9, 11-13, 15-22 comprise 2′-O-methyl modification.

192. The oligonucleotide of claim 184, wherein a 4′-carbon of the sugar of the 5′-nucleotide of the antisense strand comprises a phosphate analog.

193. The oligonucleotide of claim 184, wherein at least one nucleotide of the oligonucleotide is conjugated to one or more targeting ligands, optionally, wherein the one or more targeting ligands is a saturated or unsaturated fatty acid moiety.

194. An oligonucleotide for reducing STAT3 expression, the oligonucleotide comprising an antisense of SEQ ID NO: 1145 and further comprising a sense strand of SEQ ID NO: 1055, wherein:
the antisense strand comprises
[MePhosphonate-4O-mUs][fUs][fAs][fA][fU][mU][fU][mU][mA][fA][mG][mC][mU][fG][mA][mU][mA][m A][mU][mUs][mGs][mG]
and the sense strand comprises
[mAs][mA][mU][mU][mA][mU][mC][fA][fG][fC][fU][mU][mA][mA][mA][mA][mU][mU][mA][mA][mG][mC][mA][mG][mC][mC][mG][ademA-GalNAc][ademA-GalNAc][ademA-GalNAc][mG][mG][mC][mU][mG][mC].

195. A pharmaceutical composition comprising the oligonucleotide or oligonucleotide-ligand conjugate of claim 184 and a pharmaceutically acceptable carrier, delivery agent or excipient.

196. A composition for use in treating a disorder or condition associated with STAT3 expression in a patient in need thereof, wherein the composition comprises the oligonucleotide or oligonucleotide-ligand conjugate of claim 184.

197. The composition of claim 196, wherein the disorder or condition associated with STAT3 expression is cancer.

198. The composition of claim 197, wherein the cancer comprises a carcinoma, sarcoma, melanoma, lymphoma, and leukemia, prostate cancer, breast cancer, hepatocellular carcinoma (HCC), colorectal cancer, pancreatic cancer or a glioblastoma.

199. A method of treating a subject having a disease, disorder or condition associated with STAT3 expression, the method comprising administering to the subject a therapeutically effective amount of the oligonucleotide or oligonucleotide-ligand conjugate of claim 184.

200. The method of claim 199, wherein the disorder or condition is cancer.

201. The method of claim 199, wherein the disorder or condition is carcinoma, sarcoma, melanoma, lymphoma, and leukemia, prostate cancer, breast cancer, hepatocellular carcinoma (HCC), colorectal cancer, pancreatic cancer or glioblastoma.

202. A kit comprising the oligonucleotide or oligonucleotide-ligand conjugate of claim 184, an optional pharmaceutically acceptable carrier, and a package insert comprising instructions for administration to a subject having a disease, disorder or condition associated with STAT3 expression.

The application's sequence listing, which the Patent Office published only in electronic form, follows.

SEQUENCE LISTING (1229 sequences)

SEQ ID NO: 1 - RNA, 36 nt, Artificial Sequence
  synthetic construct
gguggaugaaacucaguuuagcagccgaaaggcugc

SEQ ID NO: 2 - RNA, 22 nt, Artificial Sequence
  synthetic construct
uaaacugaguuucauccaccgg

SEQ ID NO: 3 - RNA, 36 nt, Artificial Sequence; identical to SEQ ID NO: 1
  synthetic construct
  misc_feature (1)..(2): linked via phosphorothioate
  modified_base (1)..(1): 2'-O-methyl modified
  modified_base (2)..(2): 2'-O-methyl modified
  modified_base (3)..(3): 2'-fluoro modified
  modified_base (4)..(4): 2'-O-methyl modified
  modified_base (5)..(5): 2'-fluoro modified
  modified_base (6)..(6): 2'-O-methyl modified
  modified_base (7)..(7): 2'-O-methyl modified
  modified_base (8)..(8): 2'-fluoro modified
  modified_base (9)..(9): 2'-O-methyl modified
  modified_base (10)..(10): 2'-fluoro modified
  modified_base (11)..(11): 2'-O-methyl modified
  modified_base (12)..(12): 2'-fluoro modified
  modified_base (13)..(13): 2'-fluoro modified
  modified_base (14)..(14): 2'-O-methyl modified
  modified_base (15)..(15): 2'-fluoro modified
  modified_base (16)..(16): 2'-O-methyl modified
  modified_base (17)..(17): 2'-fluoro modified
  modified_base (18)..(18): 2'-O-methyl modified
  modified_base (19)..(19): 2'-O-methyl modified
  modified_base (20)..(20): 2'-O-methyl modified
  modified_base (21)..(21): 2'-O-methyl modified
  modified_base (22)..(22): 2'-O-methyl modified
  modified_base (23)..(23): 2'-O-methyl modified
  modified_base (24)..(24): 2'-O-methyl modified
  modified_base (25)..(25): 2'-O-methyl modified
  modified_base (26)..(26): 2'-O-methyl modified
  modified_base (27)..(27): 2'-O-methyl modified
  modified_base (28)..(28): C18 lipid conjugate attached
  modified_base (29)..(29): 2'-O-methyl modified
  modified_base (30)..(30): 2'-O-methyl modified
  modified_base (31)..(31): 2'-O-methyl modified
  modified_base (32)..(32): 2'-O-methyl modified
  modified_base (33)..(33): 2'-O-methyl modified
  modified_base (34)..(34): 2'-O-methyl modified
  modified_base (35)..(35): 2'-O-methyl modified
  modified_base (36)..(36): 2'-O-methyl modified

SEQ ID NO: 4 - RNA, 22 nt, Artificial Sequence
  synthetic construct
  misc_feature (1)..(3): linked via phosphorothioate
  modified_base (1)..(1): 5'-methoxyphosphonate-4-oxy modified
  modified_base (2)..(2): 2'-fluoro modified
  modified_base (3)..(3): 2'-fluoro modified
  modified_base (4)..(4): 2'-fluoro modified
  modified_base (5)..(5): 2'-fluoro modified
  modified_base (6)..(6): 2'-O-methyl modified
  modified_base (7)..(7): 2'-fluoro modified
  modified_base (8)..(8): 2'-O-methyl modified
  modified_base (9)..(9): 2'-O-methyl modified
  modified_base (10)..(10): 2'-fluoro modified
  modified_base (11)..(11): 2'-O-methyl modified
  modified_base (12)..(12): 2'-O-methyl modified
  modified_base (13)..(13): 2'-O-methyl modified
  modified_base (14)..(14): 2'-fluoro modified
  modified_base (15)..(15): 2'-O-methyl modified
  modified_base (16)..(16): 2'-fluoro modified
  modified_base (17)..(17): 2'-O-methyl modified
  modified_base (18)..(18): 2'-O-methyl modified
  modified_base (19)..(19): 2'-fluoro modified
  misc_feature (20)..(22): linked via phosphorothioate
  modified_base (20)..(20): 2'-O-methyl modified
  modified_base (21)..(21): 2'-O-methyl modified
  modified_base (22)..(22): 2'-O-methyl modified
uaaacugaguuucauccaccgg

SEQ ID NO: 5 - RNA, 36 nt, Artificial Sequence; identical to SEQ ID NO: 1
  synthetic construct

SEQ ID NO: 6 - RNA, 22 nt, Artificial Sequence
  synthetic construct
uaaacugaguuucauccaccgg

SEQ ID NO: 7 - RNA, 36 nt, Artificial Sequence; identical to SEQ ID NO: 1
  synthetic construct
  misc_feature (1)..(2): linked via phosphorothioate
  modified_base (1)..(1): 2'-O-methyl modified
  modified_base (2)..(2): 2'-O-methyl modified
  modified_base (3)..(3): 2'-fluoro modified
  modified_base (4)..(4): 2'-O-methyl modified
  modified_base (5)..(5): 2'-fluoro modified
  modified_base (6)..(6): 2'-O-methyl modified
  modified_base (7)..(7): 2'-O-methyl modified
  modified_base (8)..(8): 2'-fluoro modified
  modified_base (9)..(9): 2'-O-methyl modified
  modified_base (10)..(10): 2'-fluoro modified
  modified_base (11)..(11): 2'-O-methyl modified
  modified_base (12)..(12): 2'-fluoro modified
  modified_base (13)..(13): 2'-fluoro modified
  modified_base (14)..(14): 2'-O-methyl modified
  modified_base (15)..(15): 2'-fluoro modified
  modified_base (16)..(16): 2'-O-methyl modified
  modified_base (17)..(17): 2'-fluoro modified
  modified_base (18)..(18): 2'-O-methyl modified
  modified_base (19)..(19): 2'-O-methyl modified
  modified_base (20)..(20): 2'-O-methyl modified
  modified_base (21)..(21): 2'-O-methyl modified
  modified_base (22)..(22): 2'-O-methyl modified
  modified_base (23)..(23): 2'-O-methyl modified
  modified_base (24)..(24): 2'-O-methyl modified
  modified_base (25)..(25): 2'-O-methyl modified
  modified_base (26)..(26): 2'-O-methyl modified
  modified_base (27)..(27): 2'-O-methyl modified
  modified_base (28)..(28): C22 lipid conjugate attached
  modified_base (29)..(29): 2'-O-methyl modified
  modified_base (30)..(30): 2'-O-methyl modified
  modified_base (31)..(31): 2'-O-methyl modified
  modified_base (32)..(32): 2'-O-methyl modified
  modified_base (33)..(33): 2'-O-methyl modified
  modified_base (34)..(34): 2'-O-methyl modified
  modified_base (35)..(35): 2'-O-methyl modified
  modified_base (36)..(36): 2'-O-methyl modified

SEQ ID NO: 8 - RNA, 22 nt, Artificial Sequence
  synthetic construct
  misc_feature (1)..(3): linked via phosphorothioate
  modified_base (1)..(1): 5'-methoxyphosphonate-4-oxy modified
  modified_base (2)..(2): 2'-fluoro modified
  modified_base (3)..(3): 2'-fluoro modified
  modified_base (4)..(4): 2'-fluoro modified
  modified_base (5)..(5): 2'-fluoro modified
  modified_base (6)..(6): 2'-O-methyl modified
  modified_base (7)..(7): 2'-fluoro modified
  modified_base (8)..(8): 2'-O-methyl modified
  modified_base (9)..(9): 2'-O-methyl modified
  modified_base (10)..(10): 2'-fluoro modified
  modified_base (11)..(11): 2'-O-methyl modified
  modified_base (12)..(12): 2'-O-methyl modified
  modified_base (13)..(13): 2'-O-methyl modified
  modified_base (14)..(14): 2'-fluoro modified
  modified_base (15)..(15): 2'-O-methyl modified
  modified_base (16)..(16): 2'-fluoro modified
  modified_base (17)..(17): 2'-O-methyl modified
  modified_base (18)..(18): 2'-O-methyl modified
  modified_base (19)..(19): 2'-fluoro modified
  misc_feature (20)..(22): linked via phosphorothioate
  modified_base (20)..(20): 2'-O-methyl modified
  modified_base (21)..(21): 2'-O-methyl modified
  modified_base (22)..(22): 2'-O-methyl modified
uaaacugaguuucauccaccgg

SEQ ID NO: 9 - RNA, 36 nt, Artificial Sequence
  synthetic construct
aggacgacuuugauuucaaagcagccgaaaggcugc

SEQ ID NO: 10 - RNA, 22 nt, Artificial Sequence
  synthetic construct
uuugaaaucaaagucguccugg

SEQ ID NO: 11 - RNA, 36 nt, Artificial Sequence; identical to SEQ ID NO: 9
  synthetic construct
  misc_feature (1)..(2): linked via phosphorothioate
  modified_base (1)..(1): 2'-O-methyl modified
  modified_base (2)..(2): 2'-O-methyl modified
  modified_base (3)..(3): 2'-O-methyl modified
  modified_base (4)..(4): 2'-O-methyl modified
  modified_base (5)..(5): 2'-O-methyl modified
  modified_base (6)..(6): 2'-O-methyl modified
  modified_base (7)..(7): 2'-O-methyl modified
  modified_base (8)..(8): 2'-fluoro modified
  modified_base (9)..(9): 2'-fluoro modified
  modified_base (10)..(10): 2'-fluoro modified
  modified_base (11)..(11): 2'-fluoro modified
  modified_base (12)..(12): 2'-O-methyl modified
  modified_base (13)..(13): 2'-O-methyl modified
  modified_base (14)..(14): 2'-O-methyl modified
  modified_base (15)..(15): 2'-O-methyl modified
  modified_base (16)..(16): 2'-O-methyl modified
  modified_base (17)..(17): 2'-O-methyl modified
  modified_base (18)..(18): 2'-O-methyl modified
  modified_base (19)..(19): 2'-O-methyl modified
  modified_base (20)..(20): 2'-O-methyl modified
  modified_base (21)..(21): 2'-O-methyl modified
  modified_base (22)..(22): 2'-O-methyl modified
  modified_base (23)..(23): 2'-O-methyl modified
  modified_base (24)..(24): 2'-O-methyl modified
  modified_base (25)..(25): 2'-O-methyl modified
  modified_base (26)..(26): 2'-O-methyl modified
  modified_base (27)..(27): 2'-O-methyl modified
  modified_base (28)..(28): GalNAc-conjugated
  modified_base (29)..(29): GalNAc-conjugated
  modified_base (30)..(30): GalNAc-conjugated
  modified_base (31)..(31): 2'-O-methyl modified
  modified_base (32)..(32): 2'-O-methyl modified
  modified_base (33)..(33): 2'-O-methyl modified
  modified_base (34)..(34): 2'-O-methyl modified
  modified_base (35)..(35): 2'-O-methyl modified
  modified_base (36)..(36): 2'-O-methyl modified

SEQ ID NO: 12 - RNA, 22 nt, Artificial Sequence
  synthetic construct
  misc_feature (1)..(3): linked via phosphorothioate
  modified_base (1)..(1): 5'-methoxyphosphonate-4-oxy modified
  modified_base (2)..(2): 2'-fluoro modified
  modified_base (3)..(3): 2'-fluoro modified
  modified_base (4)..(4): 2'-fluoro modified
  modified_base (5)..(5): 2'-fluoro modified
  modified_base (6)..(6): 2'-O-methyl modified
  modified_base (7)..(7): 2'-fluoro modified
  modified_base (8)..(8): 2'-O-methyl modified
  modified_base (9)..(9): 2'-O-methyl modified
  modified_base (10)..(10): 2'-fluoro modified
  modified_base (11)..(11): 2'-O-methyl modified
  modified_base (12)..(12): 2'-O-methyl modified
  modified_base (13)..(13): 2'-O-methyl modified
  modified_base (14)..(14): 2'-fluoro modified
  modified_base (15)..(15): 2'-O-methyl modified
  modified_base (16)..(16): 2'-O-methyl modified
  modified_base (17)..(17): 2'-O-methyl modified
  modified_base (18)..(18): 2'-O-methyl modified
  modified_base (19)..(19): 2'-O-methyl modified
  misc_feature (20)..(22): linked via phosphorothioate
  modified_base (20)..(20): 2'-O-methyl modified
  modified_base (21)..(21): 2'-O-methyl modified
  modified_base (22)..(22): 2'-O-methyl modified
uuugaaaucaaagucguccugg

SEQ ID NO: 13 - RNA, 36 nt, Artificial Sequence
  synthetic construct
ucaaauuuccugaguugaaagcagccgaaaggcugc

SEQ ID NO: 14 - RNA, 21 nt, Artificial Sequence
  synthetic construct
uuucaacucaggaauuugagg

SEQ ID NO: 15 - RNA, 36 nt, Artificial Sequence; identical to SEQ ID NO: 13
  synthetic construct
  misc_feature (1)..(2): linked via phosphorothioate
  modified_base (1)..(1): 2'-O-methyl modified
  modified_base (2)..(2): 2'-O-methyl modified
  modified_base (3)..(3): 2'-O-methyl modified
  modified_base (4)..(4): 2'-O-methyl modified
  modified_base (5)..(5): 2'-O-methyl modified
  modified_base (6)..(6): 2'-O-methyl modified
  modified_base (7)..(7): 2'-O-methyl modified
  modified_base (8)..(8): 2'-fluoro modified
  modified_base (9)..(9): 2'-fluoro modified
  modified_base (10)..(10): 2'-fluoro modified
  modified_base (11)..(11): 2'-fluoro modified
  modified_base (12)..(12): 2'-O-methyl modified
  modified_base (13)..(13): 2'-O-methyl modified
  modified_base (14)..(14): 2'-O-methyl modified
  modified_base (15)..(15): 2'-O-methyl modified
  modified_base (16)..(16): 2'-O-methyl modified
  modified_base (17)..(17): 2'-O-methyl modified
  modified_base (18)..(18): 2'-O-methyl modified
  modified_base (19)..(19): 2'-O-methyl modified
  modified_base (20)..(20): 2'-O-methyl modified
  modified_base (21)..(21): 2'-O-methyl modified
  modified_base (22)..(22): 2'-O-methyl modified
  modified_base (23)..(23): 2'-O-methyl modified
  modified_base (24)..(24): 2'-O-methyl modified
  modified_base (25)..(25): 2'-O-methyl modified
  modified_base (26)..(26): 2'-O-methyl modified
  modified_base (27)..(27): 2'-O-methyl modified
  modified_base (28)..(28): GalNAc-conjugated
  modified_base (29)..(29): GalNAc-conjugated
  modified_base (30)..(30): GalNAc-conjugated
  modified_base (31)..(31): 2'-O-methyl modified
  modified_base (32)..(32): 2'-O-methyl modified
  modified_base (33)..(33): 2'-O-methyl modified
  modified_base (34)..(34): 2'-O-methyl modified
  modified_base (35)..(35): 2'-O-methyl modified
  modified_base (36)..(36): 2'-O-methyl modified

SEQ ID NO: 16 - RNA, 22 nt, Artificial Sequence
  synthetic construct
  misc_feature (1)..(3): linked via phosphorothioate
  modified_base (1)..(1): 5'-methoxyphosphonate-4-oxy modified
  modified_base (2)..(2): 2'-fluoro modified
  modified_base (3)..(3): 2'-fluoro modified
  modified_base (4)..(4): 2'-fluoro modified
  modified_base (5)..(5): 2'-fluoro modified
  modified_base (6)..(6): 2'-O-methyl modified
  modified_base (7)..(7): 2'-fluoro modified
  modified_base (8)..(8): 2'-O-methyl modified
  modified_base (9)..(9): 2'-O-methyl modified
  modified_base (10)..(10): 2'-fluoro modified
  modified_base (11)..(11): 2'-O-methyl modified
  modified_base (12)..(12): 2'-O-methyl modified
  modified_base (13)..(13): 2'-O-methyl modified
  modified_base (14)..(14): 2'-fluoro modified
  modified_base (15)..(15): 2'-O-methyl modified
  modified_base (16)..(16): 2'-O-methyl modified
  modified_base (17)..(17): 2'-O-methyl modified
  modified_base (18)..(18): 2'-O-methyl modified
  modified_base (19)..(19): 2'-O-methyl modified
  misc_feature (20)..(22): linked via phosphorothioate
  modified_base (20)..(20): 2'-O-methyl modified
  modified_base (21)..(21): 2'-O-methyl modified
  modified_base (22)..(22): 2'-O-methyl modified
uuucaacucaggaaauuugagg

SEQ ID NO: 17 - RNA, 36 nt, Artificial Sequence
  synthetic construct
auuuccugaguugaauuauagcagccgaaaggcugc

SEQ ID NO: 18 - RNA, 22 nt, Artificial Sequence
  synthetic construct
uauaauucaacucaggaaaugg

SEQ ID NO: 19 - RNA, 36 nt, Artificial Sequence; identical to SEQ ID NO: 17
  synthetic construct
  misc_feature (1)..(2): linked via phosphorothioate
  modified_base (1)..(1): 2'-O-methyl modified
  modified_base (2)..(2): 2'-O-methyl modified
  modified_base (3)..(3): 2'-O-methyl modified
  modified_base (4)..(4): 2'-O-methyl modified
  modified_base (5)..(5): 2'-O-methyl modified
  modified_base (6)..(6): 2'-O-methyl modified
  modified_base (7)..(7): 2'-O-methyl modified
  modified_base (8)..(8): 2'-fluoro modified
  modified_base (9)..(9): 2'-fluoro modified
  modified_base (10)..(10): 2'-fluoro modified
  modified_base (11)..(11): 2'-fluoro modified
  modified_base (12)..(12): 2'-O-methyl modified
  modified_base (13)..(13): 2'-O-methyl modified
  modified_base (14)..(14): 2'-O-methyl modified
  modified_base (15)..(15): 2'-O-methyl modified
  modified_base (16)..(16): 2'-O-methyl modified
  modified_base (17)..(17): 2'-O-methyl modified
  modified_base (18)..(18): 2'-O-methyl modified
  modified_base (19)..(19): 2'-O-methyl modified
  modified_base (20)..(20): 2'-O-methyl modified
  modified_base (21)..(21): 2'-O-methyl modified
  modified_base (22)..(22): 2'-O-methyl modified
  modified_base (23)..(23): 2'-O-methyl modified
  modified_base (24)..(24): 2'-O-methyl modified
  modified_base (25)..(25): 2'-O-methyl modified
  modified_base (26)..(26): 2'-O-methyl modified
  modified_base (27)..(27): 2'-O-methyl modified
  modified_base (28)..(28): GalNAc-conjugated
  modified_base (29)..(29): GalNAc-conjugated
  modified_base (30)..(30): GalNAc-conjugated
  modified_base (31)..(31): 2'-O-methyl modified
  modified_base (32)..(32): 2'-O-methyl modified
  modified_base (33)..(33): 2'-O-methyl modified
  modified_base (34)..(34): 2'-O-methyl modified
  modified_base (35)..(35): 2'-O-methyl modified
  modified_base (36)..(36): 2'-O-methyl modified

SEQ ID NO: 20 - RNA, 22 nt, Artificial Sequence
  synthetic construct
  misc_feature (1)..(3): linked via phosphorothioate
  modified_base (1)..(1): 5'-methoxyphosphonate-4-oxy modified
  modified_base (2)..(2): 2'-fluoro modified
  modified_base (3)..(3): 2'-fluoro modified
  modified_base (4)..(4): 2'-fluoro modified
  modified_base (5)..(5): 2'-fluoro modified
  modified_base (6)..(6): 2'-O-methyl modified
  modified_base (7)..(7): 2'-fluoro modified
  modified_base (8)..(8): 2'-O-methyl modified
  modified_base (9)..(9): 2'-O-methyl modified
  modified_base (10)..(10): 2'-fluoro modified
  modified_base (11)..(11): 2'-O-methyl modified
  modified_base (12)..(12): 2'-O-methyl modified
  modified_base (13)..(13): 2'-O-methyl modified
  modified_base (14)..(14): 2'-fluoro modified
  modified_base (15)..(15): 2'-O-methyl modified
  modified_base (16)..(16): 2'-O-methyl modified
  modified_base (17)..(17): 2'-O-methyl modified
  modified_base (18)..(18): 2'-O-methyl modified
  modified_base (19)..(19): 2'-O-methyl modified
  misc_feature (20)..(22): linked via phosphorothioate
  modified_base (20)..(20): 2'-O-methyl modified
  modified_base (21)..(21): 2'-O-methyl modified
  modified_base (22)..(22): 2'-O-methyl modified
uauaauucaacucaggaaaugg

SEQ ID NO: 21 - RNA, 36 nt, Artificial Sequence
  synthetic construct
ccugaguugaauuaucagcagcagccgaaaggcugc

SEQ ID NO: 22 - RNA, 22 nt, Artificial Sequence
  synthetic construct
ugcugauaauucaacucagggg

SEQ ID NO: 23 - RNA, 36 nt, Artificial Sequence; identical to SEQ ID NO: 21
  synthetic construct
  misc_feature (1)..(2): linked via phosphorothioate
  modified_base (1)..(1): 2'-O-methyl modified
  modified_base (2)..(2): 2'-O-methyl modified
  modified_base (3)..(3): 2'-O-methyl modified
  modified_base (4)..(4): 2'-O-methyl modified
  modified_base (5)..(5): 2'-O-methyl modified
  modified_base (6)..(6): 2'-O-methyl modified
  modified_base (7)..(7): 2'-O-methyl modified
  modified_base (8)..(8): 2'-fluoro modified
  modified_base (9)..(9): 2'-fluoro modified
  modified_base (10)..(10): 2'-fluoro modified
  modified_base (11)..(11): 2'-fluoro modified
  modified_base (12)..(12): 2'-O-methyl modified
  modified_base (13)..(13): 2'-O-methyl modified
  modified_base (14)..(14): 2'-O-methyl modified
  modified_base (15)..(15): 2'-O-methyl modified
  modified_base (16)..(16): 2'-O-methyl modified
  modified_base (17)..(17): 2'-O-methyl modified
  modified_base (18)..(18): 2'-O-methyl modified
  modified_base (19)..(19): 2'-O-methyl modified
  modified_base (20)..(20): 2'-O-methyl modified
  modified_base (21)..(21): 2'-O-methyl modified
  modified_base (22)..(22): 2'-O-methyl modified
  modified_base (23)..(23): 2'-O-methyl modified
  modified_base (24)..(24): 2'-O-methyl modified
  modified_base (25)..(25): 2'-O-methyl modified
  modified_base (26)..(26): 2'-O-methyl modified
  modified_base (27)..(27): 2'-O-methyl modified
  modified_base (28)..(28): GalNAc-conjugated
  modified_base (29)..(29): GalNAc-conjugated
  modified_base (30)..(30): GalNAc-conjugated
  modified_base (31)..(31): 2'-O-methyl modified
  modified_base (32)..(32): 2'-O-methyl modified
  modified_base (33)..(33): 2'-O-methyl modified
  modified_base (34)..(34): 2'-O-methyl modified
  modified_base (35)..(35): 2'-O-methyl modified
  modified_base (36)..(36): 2'-O-methyl modified

SEQ ID NO: 24 - RNA, 22 nt, Artificial Sequence
  synthetic construct
  misc_feature (1)..(3): linked via phosphorothioate
  modified_base (1)..(1): 5'-methoxyphosphonate-4-oxy modified
  modified_base (2)..(2): 2'-fluoro modified
  modified_base (3)..(3): 2'-fluoro modified
  modified_base (4)..(4): 2'-fluoro modified
  modified_base (5)..(5): 2'-fluoro modified
  modified_base (6)..(6): 2'-O-methyl modified
  modified_base (7)..(7): 2'-fluoro modified
  modified_base (8)..(8): 2'-O-methyl modified
  modified_base (9)..(9): 2'-O-methyl modified
  modified_base (10)..(10): 2'-fluoro modified
  modified_base (11)..(11): 2'-O-methyl modified
  modified_base (12)..(12): 2'-O-methyl modified
  modified_base (13)..(13): 2'-O-methyl modified
  modified_base (14)..(14): 2'-fluoro modified
  modified_base (15)..(15): 2'-O-methyl modified
  modified_base (16)..(16): 2'-O-methyl modified
  modified_base (17)..(17): 2'-O-methyl modified
  modified_base (18)..(18): 2'-O-methyl modified
  modified_base (19)..(19): 2'-O-methyl modified
  misc_feature (20)..(22): linked via phosphorothioate
  modified_base (20)..(20): 2'-O-methyl modified
  modified_base (21)..(21): 2'-O-methyl modified
  modified_base (22)..(22): 2'-O-methyl modified
ugcugauaauucaacucagggg

SEQ ID NO: 25 - RNA, 36 nt, Artificial Sequence
  synthetic construct
cugaguugaauuaucagcuagcagccgaaaggcugc

SEQ ID NO: 26 - RNA, 22 nt, Artificial Sequence
  synthetic construct
uagcugauaauucaacucaggg

SEQ ID NO: 27 - RNA, 36 nt, Artificial Sequence; identical to SEQ ID NO: 25
  synthetic construct
  misc_feature (1)..(2): linked via phosphorothioate
  modified_base (1)..(1): 2'-O-methyl modified
  modified_base (2)..(2): 2'-O-methyl modified
  modified_base (3)..(3): 2'-O-methyl modified
  modified_base (4)..(4): 2'-O-methyl modified
  modified_base (5)..(5): 2'-O-methyl modified
  modified_base (6)..(6): 2'-O-methyl modified
  modified_base (7)..(7): 2'-O-methyl modified
  modified_base (8)..(8): 2'-fluoro modified
  modified_base (9)..(9): 2'-fluoro modified
  modified_base (10)..(10): 2'-fluoro modified
  modified_base (11)..(11): 2'-fluoro modified
  modified_base (12)..(12): 2'-O-methyl modified
  modified_base (13)..(13): 2'-O-methyl modified
  modified_base (14)..(14): 2'-O-methyl modified
  modified_base (15)..(15): 2'-O-methyl modified
  modified_base (16)..(16): 2'-O-methyl modified
  modified_base (17)..(17): 2'-O-methyl modified
  modified_base (18)..(18): 2'-O-methyl modified
  modified_base (19)..(19): 2'-O-methyl modified
  modified_base (20)..(20): 2'-O-methyl modified
  modified_base (21)..(21): 2'-O-methyl modified
  modified_base (22)..(22): 2'-O-methyl modified
  modified_base (23)..(23): 2'-O-methyl modified
  modified_base (24)..(24): 2'-O-methyl modified
  modified_base (25)..(25): 2'-O-methyl modified
  modified_base (26)..(26): 2'-O-methyl modified
  modified_base (27)..(27): 2'-O-methyl modified
  modified_base (28)..(28): GalNAc-conjugated
  modified_base (29)..(29): GalNAc-conjugated
  modified_base (30)..(30): GalNAc-conjugated
  modified_base (31)..(31): 2'-O-methyl modified
  modified_base (32)..(32): 2'-O-methyl modified
  modified_base (33)..(33): 2'-O-methyl modified
  modified_base (34)..(34): 2'-O-methyl modified
  modified_base (35)..(35): 2'-O-methyl modified
  modified_base (36)..(36): 2'-O-methyl modified

SEQ ID NO: 28 - RNA, 22 nt, Artificial Sequence
  synthetic construct
  misc_feature (1)..(3): linked via phosphorothioate
  modified_base (1)..(1): 5'-methoxyphosphonate-4-oxy modified
  modified_base (2)..(2): 2'-fluoro modified
  modified_base (3)..(3): 2'-fluoro modified
  modified_base (4)..(4): 2'-fluoro modified
  modified_base (5)..(5): 2'-fluoro modified
  modified_base (6)..(6): 2'-O-methyl modified
  modified_base (7)..(7): 2'-fluoro modified
  modified_base (8)..(8): 2'-O-methyl modified
  modified_base (9)..(9): 2'-O-methyl modified
  modified_base (10)..(10): 2'-fluoro modified
  modified_base (11)..(11): 2'-O-methyl modified
  modified_base (12)..(12): 2'-O-methyl modified
  modified_base (13)..(13): 2'-O-methyl modified
  modified_base (14)..(14): 2'-fluoro modified
  modified_base (15)..(15): 2'-O-methyl modified
  modified_base (16)..(16): 2'-O-methyl modified
  modified_base (17)..(17): 2'-O-methyl modified
  modified_base (18)..(18): 2'-O-methyl modified
  modified_base (19)..(19): 2'-O-methyl modified
  misc_feature (20)..(22): linked via phosphorothioate
  modified_base (20)..(20): 2'-O-methyl modified
  modified_base (21)..(21): 2'-O-methyl modified
  modified_base (22)..(22): 2'-O-methyl modified
uagcugauaauucaacucaggg

SEQ ID NO: 29 - RNA, 36 nt, Artificial Sequence
  synthetic construct
ugaguugaauuaucagcuuagcagccgaaaggcugc

SEQ ID NO: 30 - RNA, 22 nt, Artificial Sequence
  synthetic construct
uaagcugauaauucaacucagg

SEQ ID NO: 31 - RNA, 36 nt, Artificial Sequence; identical to SEQ ID NO: 29
  synthetic construct
  misc_feature (1)..(2): linked via phosphorothioate
  modified_base (1)..(1): 2'-O-methyl modified
  modified_base (2)..(2): 2'-O-methyl modified
  modified_base (3)..(3): 2'-O-methyl modified
  modified_base (4)..(4): 2'-O-methyl modified
  modified_base (5)..(5): 2'-O-methyl modified
  modified_base (6)..(6): 2'-O-methyl modified
  modified_base (7)..(7): 2'-O-methyl modified
  modified_base (8)..(8): 2'-fluoro modified
  modified_base (9)..(9): 2'-fluoro modified
  modified_base (10)..(10): 2'-fluoro modified
  modified_base (11)..(11): 2'-fluoro modified
  modified_base (12)..(12): 2'-O-methyl modified
  modified_base (13)..(13): 2'-O-methyl modified
  modified_base (14)..(14): 2'-O-methyl modified
  modified_base (15)..(15): 2'-O-methyl modified
  modified_base (16)..(16): 2'-O-methyl modified
  modified_base (17)..(17): 2'-O-methyl modified
  modified_base (18)..(18): 2'-O-methyl modified
  modified_base (19)..(19): 2'-O-methyl modified
  modified_base (20)..(20): 2'-O-methyl modified
  modified_base (21)..(21): 2'-O-methyl modified
  modified_base (22)..(22): 2'-O-methyl modified
  modified_base (23)..(23): 2'-O-methyl modified
  modified_base (24)..(24): 2'-O-methyl modified
  modified_base (25)..(25): 2'-O-methyl modified
  modified_base (26)..(26): 2'-O-methyl modified
  modified_base (27)..(27): 2'-O-methyl modified
  modified_base (28)..(28): GalNAc-conjugated
  modified_base (29)..(29): GalNAc-conjugated
  modified_base (30)..(30): GalNAc-conjugated
  modified_base (31)..(31): 2'-O-methyl modified
  modified_base (32)..(32): 2'-O-methyl modified
  modified_base (33)..(33): 2'-O-methyl modified
  modified_base (34)..(34): 2'-O-methyl modified
  modified_base (35)..(35): 2'-O-methyl modified
  modified_base (36)..(36): 2'-O-methyl modified

SEQ ID NO: 32 - RNA, 22 nt, Artificial Sequence
  synthetic construct
  misc_feature (1)..(3): linked via phosphorothioate
  modified_base (1)..(1): 5'-methoxyphosphonate-4-oxy modified
  modified_base (2)..(2): 2'-fluoro modified
  modified_base (3)..(3): 2'-fluoro modified
  modified_base (4)..(4): 2'-fluoro modified
  modified_base (5)..(5): 2'-fluoro modified
  modified_base (6)..(6): 2'-O-methyl modified
  modified_base (7)..(7): 2'-fluoro modified
  modified_base (8)..(8): 2'-O-methyl modified
  modified_base (9)..(9): 2'-O-methyl modified
  modified_base (10)..(10): 2'-fluoro modified
  modified_base (11)..(11): 2'-O-methyl modified
  modified_base (12)..(12): 2'-O-methyl modified
  modified_base (13)..(13): 2'-O-methyl modified
  modified_base (14)..(14): 2'-fluoro modified
  modified_base (15)..(15): 2'-O-methyl modified
  modified_base (16)..(16): 2'-O-methyl modified
  modified_base (17)..(17): 2'-O-methyl modified
  modified_base (18)..(18): 2'-O-methyl modified
  modified_base (19)..(19): 2'-O-methyl modified
  misc_feature (20)..(22): linked via phosphorothioate
  modified_base (20)..(20): 2'-O-methyl modified
  modified_base (21)..(21): 2'-O-methyl modified
  modified_base (22)..(22): 2'-O-methyl modified
uaagcugauaauucaacucagg

SEQ ID NO: 33 - RNA, 36 nt, Artificial Sequence
  synthetic construct
gaguugaauuaucagcuuaagcagccgaaaggcugc

SEQ ID NO: 34 - RNA, 22 nt, Artificial Sequence
  synthetic construct
uuaagcugauaauucaacucgg

SEQ ID NO: 35 - RNA, 36 nt, Artificial Sequence; identical to SEQ ID NO: 33
  synthetic construct
  misc_feature (1)..(2): linked via phosphorothioate
  modified_base (1)..(1): 2'-O-methyl modified
  modified_base (2)..(2): 2'-O-methyl modified
  modified_base (3)..(3): 2'-O-methyl modified
  modified_base (4)..(4): 2'-O-methyl modified
  modified_base (5)..(5): 2'-O-methyl modified
  modified_base (6)..(6): 2'-O-methyl modified
  modified_base (7)..(7): 2'-O-methyl modified
  modified_base (8)..(8): 2'-fluoro modified
  modified_base (9)..(9): 2'-fluoro modified
  modified_base (10)..(10): 2'-fluoro modified
  modified_base (11)..(11): 2'-fluoro modified
  modified_base (12)..(12): 2'-O-methyl modified
  modified_base (13)..(13): 2'-O-methyl modified
  modified_base (14)..(14): 2'-O-methyl modified
  modified_base (15)..(15): 2'-O-methyl modified
  modified_base (16)..(16): 2'-O-methyl modified
  modified_base (17)..(17): 2'-O-methyl modified
  modified_base (18)..(18): 2'-O-methyl modified
  modified_base (19)..(19): 2'-O-methyl modified
  modified_base (20)..(20): 2'-O-methyl modified
  modified_base (21)..(21): 2'-O-methyl modified
  modified_base (22)..(22): 2'-O-methyl modified
  modified_base (23)..(23): 2'-O-methyl modified
  modified_base (24)..(24): 2'-O-methyl modified
  modified_base (25)..(25): 2'-O-methyl modified
  modified_base (26)..(26): 2'-O-methyl modified
  modified_base (27)..(27): 2'-O-methyl modified
  modified_base (28)..(28): GalNAc-conjugated
  modified_base (29)..(29): GalNAc-conjugated
  modified_base (30)..(30): GalNAc-conjugated
  modified_base (31)..(31): 2'-O-methyl modified
  modified_base (32)..(32): 2'-O-methyl modified
  modified_base (33)..(33): 2'-O-methyl modified
  modified_base (34)..(34): 2'-O-methyl modified
  modified_base (35)..(35): 2'-O-methyl modified
  modified_base (36)..(36): 2'-O-methyl modified

SEQ ID NO: 36 - RNA, 22 nt, Artificial Sequence
  synthetic construct
  misc_feature (1)..(3): linked via phosphorothioate
  modified_base (1)..(1): 5'-methoxyphosphonate-4-oxy modified
  modified_base (2)..(2): 2'-fluoro modified
  modified_base (3)..(3): 2'-fluoro modified
  modified_base (4)..(4): 2'-fluoro modified
  modified_base (5)..(5): 2'-fluoro modified
  modified_base (6)..(6): 2'-O-methyl modified
  modified_base (7)..(7): 2'-fluoro modified
  modified_base (8)..(8): 2'-O-methyl modified
  modified_base (9)..(9): 2'-O-methyl modified
  modified_base (10)..(10): 2'-fluoro modified
  modified_base (11)..(11): 2'-O-methyl modified
  modified_base (12)..(12): 2'-O-methyl modified
  modified_base (13)..(13): 2'-O-methyl modified
  modified_base (14)..(14): 2'-fluoro modified
  modified_base (15)..(15): 2'-O-methyl modified
  modified_base (16)..(16): 2'-O-methyl modified
  modified_base (17)..(17): 2'-O-methyl modified
  modified_base (18)..(18): 2'-O-methyl modified
  modified_base (19)..(19): 2'-O-methyl modified
  misc_feature (20)..(22): linked via phosphorothioate
  modified_base (20)..(20): 2'-O-methyl modified
  modified_base (21)..(21): 2'-O-methyl modified
  modified_base (22)..(22): 2'-O-methyl modified
uuaagcugauaauucaacucgg

SEQ ID NO: 37 - RNA, 36 nt, Artificial Sequence
  synthetic construct
aguugaauuaucagcuuaaagcagccgaaaggcugc

SEQ ID NO: 38 - RNA, 22 nt, Artificial Sequence
  synthetic construct
uuuaagcugauaauucaacugg

SEQ ID NO: 39 - RNA, 36 nt, Artificial Sequence; identical to SEQ ID NO: 37
  synthetic construct
  misc_feature (1)..(2): linked via phosphorothioate
  modified_base (1)..(1): 2'-O-methyl modified
  modified_base (2)..(2): 2'-O-methyl modified
  modified_base (3)..(3): 2'-O-methyl modified
  modified_base (4)..(4): 2'-O-methyl modified
  modified_base (5)..(5): 2'-O-methyl modified
  modified_base (6)..(6): 2'-O-methyl modified
  modified_base (7)..(7): 2'-O-methyl modified
  modified_base (8)..(8): 2'-fluoro modified
  modified_base (9)..(9): 2'-fluoro modified
  modified_base (10)..(10): 2'-fluoro modified
  modified_base (11)..(11): 2'-fluoro modified
  modified_base (12)..(12): 2'-O-methyl modified
  modified_base (13)..(13): 2'-O-methyl modified
  modified_base (14)..(14): 2'-O-methyl modified
  modified_base (15)..(15): 2'-O-methyl modified
  modified_base (16)..(16): 2'-O-methyl modified
  modified_base (17)..(17): 2'-O-methyl modified
  modified_base (18)..(18): 2'-O-methyl modified
  modified_base (19)..(19): 2'-O-methyl modified
  modified_base (20)..(20): 2'-O-methyl modified
  modified_base (21)..(21): 2'-O-methyl modified
  modified_base (22)..(22): 2'-O-methyl modified
  modified_base (23)..(23): 2'-O-methyl modified
  modified_base (24)..(24): 2'-O-methyl modified
  modified_base (25)..(25): 2'-O-methyl modified
  modified_base (26)..(26): 2'-O-methyl modified
  modified_base (27)..(27): 2'-O-methyl modified
  modified_base (28)..(28): GalNAc-conjugated
  modified_base (29)..(29): GalNAc-conjugated
  modified_base (30)..(30): GalNAc-conjugated
  modified_base (31)..(31): 2'-O-methyl modified
  modified_base (32)..(32): 2'-O-methyl modified
  modified_base (33)..(33): 2'-O-methyl modified
  modified_base (34)..(34): 2'-O-methyl modified
  modified_base (35)..(35): 2'-O-methyl modified
  modified_base (36)..(36): 2'-O-methyl modified

SEQ ID NO: 40 - RNA, 22 nt, Artificial Sequence
  synthetic construct
  misc_feature (1)..(3): linked via phosphorothioate
  modified_base (1)..(1): 5'-methoxyphosphonate-4-oxy modified
  modified_base (2)..(2): 2'-fluoro modified
  modified_base (3)..(3): 2'-fluoro modified
  modified_base (4)..(4): 2'-fluoro modified
  modified_base (5)..(5): 2'-fluoro modified
  modified_base (6)..(6): 2'-O-methyl modified
  modified_base (7)..(7): 2'-fluoro modified
  modified_base (8)..(8): 2'-O-methyl modified
  modified_base (9)..(9): 2'-O-methyl modified
  modified_base (10)..(10): 2'-fluoro modified
  modified_base (11)..(11): 2'-O-methyl modified
  modified_base (12)..(12): 2'-O-methyl modified
  modified_base (13)..(13): 2'-O-methyl modified
  modified_base (14)..(14): 2'-fluoro modified
  modified_base (15)..(15): 2'-O-methyl modified
  modified_base (16)..(16): 2'-O-methyl modified
  modified_base (17)..(17): 2'-O-methyl modified
  modified_base (18)..(18): 2'-O-methyl modified
  modified_base (19)..(19): 2'-O-methyl modified
  misc_feature (20)..(22): linked via phosphorothioate
  modified_base (20)..(20): 2'-O-methyl modified
  modified_base (21)..(21): 2'-O-methyl modified
  modified_base (22)..(22): 2'-O-methyl modified
uuuaagcugauaauucaacugg

SEQ ID NO: 41 - RNA, 36 nt, Artificial Sequence
  synthetic construct
caauccugugguauaacauagcagccgaaaggcugc

SEQ ID NO: 42 - RNA, 22 nt, Artificial Sequence
  synthetic construct
uauguuauaccacaggauuggg

SEQ ID NO: 43 - RNA, 36 nt, Artificial Sequence; identical to SEQ ID NO: 41
  synthetic construct
  misc_feature (1)..(2): linked via phosphorothioate
  modified_base (1)..(1): 2'-O-methyl modified
  modified_base (2)..(2): 2'-O-methyl modified
  modified_base (3)..(3): 2'-O-methyl modified
  modified_base (4)..(4): 2'-O-methyl modified
  modified_base (5)..(5): 2'-O-methyl modified
  modified_base (6)..(6): 2'-O-methyl modified
  modified_base (7)..(7): 2'-O-methyl modified
  modified_base (8)..(8): 2'-fluoro modified
  modified_base (9)..(9): 2'-fluoro modified
  modified_base (10)..(10): 2'-fluoro modified
  modified_base (11)..(11): 2'-fluoro modified
  modified_base (12)..(12): 2'-O-methyl modified
  modified_base (13)..(13): 2'-O-methyl modified
  modified_base (14)..(14): 2'-O-methyl modified
  modified_base (15)..(15): 2'-O-methyl modified
  modified_base (16)..(16): 2'-O-methyl modified
  modified_base (17)..(17): 2'-O-methyl modified
  modified_base (18)..(18): 2'-O-methyl modified
  modified_base (19)..(19): 2'-O-methyl modified
  modified_base (20)..(20): 2'-O-methyl modified
  modified_base (21)..(21): 2'-O-methyl modified
  modified_base (22)..(22): 2'-O-methyl modified
  modified_base (23)..(23): 2'-O-methyl modified
  modified_base (24)..(24): 2'-O-methyl modified
  modified_base (25)..(25): 2'-O-methyl modified
  modified_base (26)..(26): 2'-O-methyl modified
  modified_base (27)..(27): 2'-O-methyl modified
  modified_base (28)..(28): GalNAc-conjugated
  modified_base (29)..(29): GalNAc-conjugated
  modified_base (30)..(30): GalNAc-conjugated
  modified_base (31)..(31): 2'-O-methyl modified
  modified_base (32)..(32): 2'-O-methyl modified
  modified_base (33)..(33): 2'-O-methyl modified
  modified_base (34)..(34): 2'-O-methyl modified
  modified_base (35)..(35): 2'-O-methyl modified
  modified_base (36)..(36): 2'-O-methyl modified

SEQ ID NO: 44 - RNA, 22 nt, Artificial Sequence
  synthetic construct
  misc_feature (1)..(3): linked via phosphorothioate
  modified_base (1)..(1): 5'-methoxyphosphonate-4-oxy modified
  modified_base (2)..(2): 2'-fluoro modified
  modified_base (3)..(3): 2'-fluoro modified
  modified_base (4)..(4): 2'-fluoro modified
  modified_base (5)..(5): 2'-fluoro modified
  modified_base (6)..(6): 2'-O-methyl modified
  modified_base (7)..(7): 2'-fluoro modified
  modified_base (8)..(8): 2'-O-methyl modified
  modified_base (9)..(9): 2'-O-methyl modified
  modified_base (10)..(10): 2'-fluoro modified
  modified_base (11)..(11): 2'-O-methyl modified
  modified_base (12)..(12): 2'-O-methyl modified
  modified_base (13)..(13): 2'-O-methyl modified
  modified_base (14)..(14): 2'-fluoro modified
  modified_base (15)..(15): 2'-O-methyl modified
  modified_base (16)..(16): 2'-O-methyl modified
  modified_base (17)..(17): 2'-O-methyl modified
  modified_base (18)..(18): 2'-O-methyl modified
  modified_base (19)..(19): 2'-O-methyl modified
  misc_feature (20)..(22): linked via phosphorothioate
  modified_base (20)..(20): 2'-O-methyl modified
  modified_base (21)..(21): 2'-O-methyl modified
  modified_base (22)..(22): 2'-O-methyl modified
uauguuauaccacaggauuggg

SEQ ID NO: 45 - RNA, 36 nt, Artificial Sequence
  synthetic construct
acaauaucaucgaccuuguagcagccgaaaggcugc

SEQ ID NO: 46 - RNA, 22 nt, Artificial Sequence
  synthetic construct
uacaaggucgaugauauugugg

SEQ ID NO: 47 - RNA, 36 nt, Artificial Sequence; identical to SEQ ID NO: 45
  synthetic construct
  misc_feature (1)..(2): linked via phosphorothioate
  modified_base (1)..(1): 2'-O-methyl modified
  modified_base (2)..(2): 2'-O-methyl modified
  modified_base (3)..(3): 2'-O-methyl modified
  modified_base (4)..(4): 2'-O-methyl modified
  modified_base (5)..(5): 2'-O-methyl modified
  modified_base (6)..(6): 2'-O-methyl modified
  modified_base (7)..(7): 2'-O-methyl modified
  modified_base (8)..(8): 2'-fluoro modified
  modified_base (9)..(9): 2'-fluoro modified
  modified_base (10)..(10): 2'-fluoro modified
  modified_base (11)..(11): 2'-fluoro modified
  modified_base (12)..(12): 2'-O-methyl modified
  modified_base (13)..(13): 2'-O-methyl modified
  modified_base (14)..(14): 2'-O-methyl modified
  modified_base (15)..(15): 2'-O-methyl modified
  modified_base (16)..(16): 2'-O-methyl modified
  modified_base (17)..(17): 2'-O-methyl modified
  modified_base (18)..(18): 2'-O-methyl modified
  modified_base (19)..(19): 2'-O-methyl modified
  modified_base (20)..(20): 2'-O-methyl modified
  modified_base (21)..(21): 2'-O-methyl modified
  modified_base (22)..(22): 2'-O-methyl modified
  modified_base (23)..(23): 2'-O-methyl modified
  modified_base (24)..(24): 2'-O-methyl modified
  modified_base (25)..(25): 2'-O-methyl modified
  modified_base (26)..(26): 2'-O-methyl modified
  modified_base (27)..(27): 2'-O-methyl modified
  modified_base (28)..(28): GalNAc-conjugated
  modified_base (29)..(29): GalNAc-conjugated
  modified_base (30)..(30): GalNAc-conjugated
  modified_base (31)..(31): 2'-O-methyl modified
  modified_base (32)..(32): 2'-O-methyl modified
  modified_base (33)..(33): 2'-O-methyl modified
  modified_base (34)..(34): 2'-O-methyl modified
  modified_base (35)..(35): 2'-O-methyl modified
  modified_base (36)..(36): 2'-O-methyl modified

SEQ ID NO: 48 - RNA, 22 nt, Artificial Sequence
  synthetic construct
  misc_feature (1)..(3): linked via phosphorothioate
  modified_base (1)..(1): 5'-methoxyphosphonate-4-oxy modified
  modified_base (2)..(2): 2'-fluoro modified
  modified_base (3)..(3): 2'-fluoro modified
  modified_base (4)..(4): 2'-fluoro modified
  modified_base (5)..(5): 2'-fluoro modified
  modified_base (6)..(6): 2'-O-methyl modified
  modified_base (7)..(7): 2'-fluoro modified
  modified_base (8)..(8): 2'-O-methyl modified
  modified_base (9)..(9): 2'-O-methyl modified
  modified_base (10)..(10): 2'-fluoro modified
  modified_base (11)..(11): 2'-O-methyl modified
  modified_base (12)..(12): 2'-O-methyl modified
  modified_base (13)..(13): 2'-O-methyl modified
  modified_base (14)..(14): 2'-fluoro modified
  modified_base (15)..(15): 2'-O-methyl modified
  modified_base (16)..(16): 2'-O-methyl modified
  modified_base (17)..(17): 2'-O-methyl modified
  modified_base (18)..(18): 2'-O-methyl modified
  modified_base (19)..(19): 2'-O-methyl modified
  misc_feature (20)..(22): linked via phosphorothioate
  modified_base (20)..(20): 2'-O-methyl modified
  modified_base (21)..(21): 2'-O-methyl modified
  modified_base (22)..(22): 2'-O-methyl modified
uacaaggucgaugauauugugg

SEQ ID NO: 49 - RNA, 36 nt, Artificial Sequence
  synthetic construct
aucaucgaccuugugaaaaagcagccgaaaggcugc

SEQ ID NO: 50 - RNA, 22 nt, Artificial Sequence
  synthetic construct
uuuuucacaaggucgaugaugg

SEQ ID NO: 51 - RNA, 36 nt, Artificial Sequence; identical to SEQ ID NO: 49
  synthetic construct
  misc_feature (1)..(2): linked via phosphorothioate
  modified_base (1)..(1): 2'-O-methyl modified
  modified_base (2)..(2): 2'-O-methyl modified
  modified_base (3)..(3): 2'-O-methyl modified
  modified_base (4)..(4): 2'-O-methyl modified
  modified_base (5)..(5): 2'-O-methyl modified
  modified_base (6)..(6): 2'-O-methyl modified
  modified_base (7)..(7): 2'-O-methyl modified
  modified_base (8)..(8): 2'-fluoro modified
  modified_base (9)..(9): 2'-fluoro modified
  modified_base (10)..(10): 2'-fluoro modified
  modified_base (11)..(11): 2'-fluoro modified
  modified_base (12)..(12): 2'-O-methyl modified
  modified_base (13)..(13): 2'-O-methyl modified
  modified_base (14)..(14): 2'-O-methyl modified
  modified_base (15)..(15): 2'-O-methyl modified
  modified_base (16)..(16): 2'-O-methyl modified
  modified_base (17)..(17): 2'-O-methyl modified
  modified_base (18)..(18): 2'-O-methyl modified
  modified_base (19)..(19): 2'-O-methyl modified
  modified_base (20)..(20): 2'-O-methyl modified
  modified_base (21)..(21): 2'-O-methyl modified
  modified_base (22)..(22): 2'-O-methyl modified
  modified_base (23)..(23): 2'-O-methyl modified
  modified_base (24)..(24): 2'-O-methyl modified
  modified_base (25)..(25): 2'-O-methyl modified
  modified_base (26)..(26): 2'-O-methyl modified
  modified_base (27)..(27): 2'-O-methyl modified
  modified_base (28)..(28): GalNAc-conjugated
  modified_base (29)..(29): GalNAc-conjugated
  modified_base (30)..(30): GalNAc-conjugated
  modified_base (31)..(31): 2'-O-methyl modified
  modified_base (32)..(32): 2'-O-methyl modified
  modified_base (33)..(33): 2'-O-methyl modified
  modified_base (34)..(34): 2'-O-methyl modified
  modified_base (35)..(35): 2'-O-methyl modified
  modified_base (36)..(36): 2'-O-methyl modified

SEQ ID NO: 52 - RNA, 22 nt, Artificial Sequence
  synthetic construct
  misc_feature (1)..(3): linked via phosphorothioate
  modified_base (1)..(1): 5'-methoxyphosphonate-4-oxy modified
  modified_base (2)..(2): 2'-fluoro modified
  modified_base (3)..(3): 2'-fluoro modified
  modified_base (4)..(4): 2'-fluoro modified
  modified_base (5)..(5): 2'-fluoro modified
  modified_base (6)..(6): 2'-O-methyl modified
  modified_base (7)..(7): 2'-fluoro modified
  modified_base (8)..(8): 2'-O-methyl modified
  modified_base (9)..(9): 2'-O-methyl modified
  modified_base (10)..(10): 2'-fluoro modified
  modified_base (11)..(11): 2'-O-methyl modified
  modified_base (12)..(12): 2'-O-methyl modified
  modified_base (13)..(13): 2'-O-methyl modified
  modified_base (14)..(14): 2'-fluoro modified
  modified_base (15)..(15): 2'-O-methyl modified
  modified_base (16)..(16): 2'-O-methyl modified
  modified_base (17)..(17): 2'-O-methyl modified
  modified_base (18)..(18): 2'-O-methyl modified
  modified_base (19)..(19): 2'-O-methyl modified
  misc_feature (20)..(22): linked via phosphorothioate
  modified_base (20)..(20): 2'-O-methyl modified
  modified_base (21)..(21): 2'-O-methyl modified
  modified_base (22)..(22): 2'-O-methyl modified
uuuuucacaaggucgaugaugg

SEQ ID NO: 53 - RNA, 36 nt, Artificial Sequence
  synthetic construct
cugaagaccaaguucaucuagcagccgaaaggcugc

SEQ ID NO: 54 - RNA, 22 nt, Artificial Sequence
  synthetic construct
uagaugaacuuggucuucaggg

SEQ ID NO: 55 - RNA, 36 nt, Artificial Sequence; identical to SEQ ID NO: 53
  synthetic construct
  misc_feature (1)..(2): linked via phosphorothioate
  modified_base (1)..(1): 2'-O-methyl modified
  modified_base (2)..(2): 2'-O-methyl modified
  modified_base (3)..(3): 2'-O-methyl modified
  modified_base (4)..(4): 2'-O-methyl modified
  modified_base (5)..(5): 2'-O-methyl modified
  modified_base (6)..(6): 2'-O-methyl modified
  modified_base (7)..(7): 2'-O-methyl modified
  modified_base (8)..(8): 2'-fluoro modified
  modified_base (9)..(9): 2'-fluoro modified
  modified_base (10)..(10): 2'-fluoro modified
  modified_base (11)..(11): 2'-fluoro modified
  modified_base (12)..(12): 2'-O-methyl modified
  modified_base (13)..(13): 2'-O-methyl modified
  modified_base (14)..(14): 2'-O-methyl modified
  modified_base (15)..(15): 2'-O-methyl modified
  modified_base (16)..(16): 2'-O-methyl modified
  modified_base (17)..(17): 2'-O-methyl modified
  modified_base (18)..(18): 2'-O-methyl modified
  modified_base (19)..(19): 2'-O-methyl modified
  modified_base (20)..(20): 2'-O-methyl modified
  modified_base (21)..(21): 2'-O-methyl modified
  modified_base (22)..(22): 2'-O-methyl modified
  modified_base (23)..(23): 2'-O-methyl modified
  modified_base (24)..(24): 2'-O-methyl modified
  modified_base (25)..(25): 2'-O-methyl modified
  modified_base (26)..(26): 2'-O-methyl modified
  modified_base (27)..(27): 2'-O-methyl modified
  modified_base (28)..(28): GalNAc-conjugated
  modified_base (29)..(29): GalNAc-conjugated
  modified_base (30)..(30): GalNAc-conjugated
  modified_base (31)..(31): 2'-O-methyl modified
  modified_base (32)..(32): 2'-O-methyl modified
  modified_base (33)..(33): 2'-O-methyl modified
  modified_base (34)..(34): 2'-O-methyl modified
  modified_base (35)..(35): 2'-O-methyl modified
  modified_base (36)..(36): 2'-O-methyl modified

SEQ ID NO: 56 - RNA, 22 nt, Artificial Sequence
  synthetic construct
  misc_feature (1)..(3): linked via phosphorothioate
  modified_base (1)..(1): 5'-methoxyphosphonate-4-oxy modified
  modified_base (2)..(2): 2'-fluoro modified
  modified_base (3)..(3): 2'-fluoro modified
  modified_base (4)..(4): 2'-fluoro modified
  modified_base (5)..(5): 2'-fluoro modified
  modified_base (6)..(6): 2'-O-methyl modified
  modified_base (7)..(7): 2'-fluoro modified
  modified_base (8)..(8): 2'-O-methyl modified
  modified_base (9)..(9): 2'-O-methyl modified
  modified_base (10)..(10): 2'-fluoro modified
  modified_base (11)..(11): 2'-O-methyl modified
  modified_base (12)..(12): 2'-O-methyl modified
  modified_base (13)..(13): 2'-O-methyl modified
  modified_base (14)..(14): 2'-fluoro modified
  modified_base (15)..(15): 2'-O-methyl modified
  modified_base (16)..(16): 2'-O-methyl modified
  modified_base (17)..(17): 2'-O-methyl modified
  modified_base (18)..(18): 2'-O-methyl modified
  modified_base (19)..(19): 2'-O-methyl modified
  misc_feature (20)..(22): linked via phosphorothioate
  modified_base (20)..(20): 2'-O-methyl modified
  modified_base (21)..(21): 2'-O-methyl modified
  modified_base (22)..(22): 2'-O-methyl modified
uagaugaacuuggucuucaggg

SEQ ID NO: 57 - RNA, 36 nt, Artificial Sequence
  synthetic construct
auucauugaugcaguuuggagcagccgaaaggcugc

SEQ ID NO: 58 - RNA, 22 nt, Artificial Sequence
  synthetic construct
uccaaacugcaucaaugaaugg

SEQ ID NO: 59 - RNA, 36 nt, Artificial Sequence; identical to SEQ ID NO: 57
  synthetic construct
  misc_feature (1)..(2): linked via phosphorothioate
  modified_base (1)..(1): 2'-O-methyl modified
  modified_base (2)..(2): 2'-O-methyl modified
  modified_base (3)..(3): 2'-O-methyl modified
  modified_base (4)..(4): 2'-O-methyl modified
  modified_base (5)..(5): 2'-O-methyl modified
  modified_base (6)..(6): 2'-O-methyl modified
  modified_base (7)..(7): 2'-O-methyl modified
  modified_base (8)..(8): 2'-fluoro modified
  modified_base (9)..(9): 2'-fluoro modified
  modified_base (10)..(10): 2'-fluoro modified
  modified_base (11)..(11): 2'-fluoro modified
  modified_base (12)..(12): 2'-O-methyl modified
  modified_base (13)..(13): 2'-O-methyl modified
  modified_base (14)..(14): 2'-O-methyl modified
  modified_base (15)..(15): 2'-O-methyl modified
  modified_base (16)..(16): 2'-O-methyl modified
  modified_base (17)..(17): 2'-O-methyl modified
  modified_base (18)..(18): 2'-O-methyl modified
  modified_base (19)..(19): 2'-O-methyl modified
  modified_base (20)..(20): 2'-O-methyl modified
  modified_base (21)..(21): 2'-O-methyl modified
  modified_base (22)..(22): 2'-O-methyl modified
  modified_base (23)..(23): 2'-O-methyl modified
  modified_base (24)..(24): 2'-O-methyl modified
  modified_base (25)..(25): 2'-O-methyl modified
  modified_base (26)..(26): 2'-O-methyl modified
  modified_base (27)..(27): 2'-O-methyl modified
  modified_base (28)..(28): GalNAc-conjugated
  modified_base (29)..(29): GalNAc-conjugated
  modified_base (30)..(30): GalNAc-conjugated
  modified_base (31)..(31): 2'-O-methyl modified
  modified_base (32)..(32): 2'-O-methyl modified
  modified_base (33)..(33): 2'-O-methyl modified
  modified_base (34)..(34): 2'-O-methyl modified
  modified_base (35)..(35): 2'-O-methyl modified
  modified_base (36)..(36): 2'-O-methyl modified

SEQ ID NO: 60 - RNA, 22 nt, Artificial Sequence
  synthetic construct
  misc_feature (1)..(3): linked via phosphorothioate
  modified_base (1)..(1): 5'-methoxyphosphonate-4-oxy modified
  modified_base (2)..(2): 2'-fluoro modified
  modified_base (3)..(3): 2'-fluoro modified
  modified_base (4)..(4): 2'-fluoro modified
  modified_base (5)..(5): 2'-fluoro modified
  modified_base (6)..(6): 2'-O-methyl modified
  modified_base (7)..(7): 2'-fluoro modified
  modified_base (8)..(8): 2'-O-methyl modified
  modified_base (9)..(9): 2'-O-methyl modified
  modified_base (10)..(10): 2'-fluoro modified
  modified_base (11)..(11): 2'-O-methyl modified
  modified_base (12)..(12): 2'-O-methyl modified
  modified_base (13)..(13): 2'-O-methyl modified
  modified_base (14)..(14): 2'-fluoro modified
  modified_base (15)..(15): 2'-O-methyl modified
  modified_base (16)..(16): 2'-O-methyl modified
  modified_base (17)..(17): 2'-O-methyl modified
  modified_base (18)..(18): 2'-O-methyl modified
  modified_base (19)..(19): 2'-O-methyl modified
  misc_feature (20)..(22): linked via phosphorothioate
  modified_base (20)..(20): 2'-O-methyl modified
  modified_base (21)..(21): 2'-O-methyl modified
  modified_base (22)..(22): 2'-O-methyl modified
uccaaacugcaucaaugaaugg

SEQ ID NO: 61 - RNA, 36 nt, Artificial Sequence
  synthetic construct
cccaucaauguucuuuaguagcagccgaaaggcugc

SEQ ID NO: 62 - RNA, 22 nt, Artificial Sequence
  synthetic construct
uacuaaagaacauugauggggg

SEQ ID NO: 63 - RNA, 36 nt, Artificial Sequence; identical to SEQ ID NO: 61
  synthetic construct
  misc_feature (1)..(2): linked via phosphorothioate
  modified_base (1)..(1): 2'-O-methyl modified
  modified_base (2)..(2): 2'-O-methyl modified
  modified_base (3)..(3): 2'-O-methyl modified
  modified_base (4)..(4): 2'-O-methyl modified
  modified_base (5)..(5): 2'-O-methyl modified
  modified_base (6)..(6): 2'-O-methyl modified
  modified_base (7)..(7): 2'-O-methyl modified
  modified_base (8)..(8): 2'-fluoro modified
  modified_base (9)..(9): 2'-fluoro modified
  modified_base (10)..(10): 2'-fluoro modified
  modified_base (11)..(11): 2'-fluoro modified
  modified_base (12)..(12): 2'-O-methyl modified
  modified_base (13)..(13): 2'-O-methyl modified
  modified_base (14)..(14): 2'-O-methyl modified
  modified_base (15)..(15): 2'-O-methyl modified
  modified_base (16)..(16): 2'-O-methyl modified
  modified_base (17)..(17): 2'-O-methyl modified
  modified_base (18)..(18): 2'-O-methyl modified
  modified_base (19)..(19): 2'-O-methyl modified
  modified_base (20)..(20): 2'-O-methyl modified
  modified_base (21)..(21): 2'-O-methyl modified
  modified_base (22)..(22): 2'-O-methyl modified
  modified_base (23)..(23): 2'-O-methyl modified
  modified_base (24)..(24): 2'-O-methyl modified
  modified_base (25)..(25): 2'-O-methyl modified
  modified_base (26)..(26): 2'-O-methyl modified
  modified_base (27)..(27): 2'-O-methyl modified
  modified_base (28)..(28): GalNAc-conjugated
  modified_base (29)..(29): GalNAc-conjugated
  modified_base (30)..(30): GalNAc-conjugated
  modified_base (31)..(31): 2'-O-methyl modified
  modified_base (32)..(32): 2'-O-methyl modified
  modified_base (33)..(33): 2'-O-methyl modified
  modified_base (34)..(34): 2'-O-methyl modified
  modified_base (35)..(35): 2'-O-methyl modified
  modified_base (36)..(36): 2'-O-methyl modified

SEQ ID NO: 64 - RNA, 22 nt, Artificial Sequence
  synthetic construct
  misc_feature (1)..(3): linked via phosphorothioate
  modified_base (1)..(1): 5'-methoxyphosphonate-4-oxy modified
  modified_base (2)..(2): 2'-fluoro modified
  modified_base (3)..(3): 2'-fluoro modified
  modified_base (4)..(4): 2'-fluoro modified
  modified_base (5)..(5): 2'-fluoro modified
  modified_base (6)..(6): 2'-O-methyl modified
  modified_base (7)..(7): 2'-fluoro modified
  modified_base (8)..(8): 2'-O-methyl modified
  modified_base (9)..(9): 2'-O-methyl modified
  modified_base (10)..(10): 2'-fluoro modified
  modified_base (11)..(11): 2'-O-methyl modified
  modified_base (12)..(12): 2'-O-methyl modified
  modified_base (13)..(13): 2'-O-methyl modified
  modified_base (14)..(14): 2'-fluoro modified
  modified_base (15)..(15): 2'-O-methyl modified
  modified_base (16)..(16): 2'-O-methyl modified
  modified_base (17)..(17): 2'-O-methyl modified
  modified_base (18)..(18): 2'-O-methyl modified
  modified_base (19)..(19): 2'-O-methyl modified
  misc_feature (20)..(22): linked via phosphorothioate
  modified_base (20)..(20): 2'-O-methyl modified
  modified_base (21)..(21): 2'-O-methyl modified
  modified_base (22)..(22): 2'-O-methyl modified
uacuaaagaacauugauggggg

SEQ ID NO: 65 - RNA, 36 nt, Artificial Sequence
  synthetic construct
aucaauguucuuuaguuauagcagccgaaaggcugc

SEQ ID NO: 66 - RNA, 22 nt, Artificial Sequence
  synthetic construct
uauaacuaaagaacauugaugg

SEQ ID NO: 67 - RNA, 36 nt, Artificial Sequence; identical to SEQ ID NO: 65
  synthetic construct
  misc_feature (1)..(2): linked via phosphorothioate
  modified_base (1)..(1): 2'-O-methyl modified
  modified_base (2)..(2): 2'-O-methyl modified
  modified_base (3)..(3): 2'-O-methyl modified
  modified_base (4)..(4): 2'-O-methyl modified
  modified_base (5)..(5): 2'-O-methyl modified
  modified_base (6)..(6): 2'-O-methyl modified
  modified_base (7)..(7): 2'-O-methyl modified
  modified_base (8)..(8): 2'-fluoro modified
  modified_base (9)..(9): 2'-fluoro modified
  modified_base (10)..(10): 2'-fluoro modified
  modified_base (11)..(11): 2'-fluoro modified
  modified_base (12)..(12): 2'-O-methyl modified
  modified_base (13)..(13): 2'-O-methyl modified
  modified_base (14)..(14): 2'-O-methyl modified
  modified_base (15)..(15): 2'-O-methyl modified
  modified_base (16)..(16): 2'-O-methyl modified
  modified_base (17)..(17): 2'-O-methyl modified
  modified_base (18)..(18): 2'-O-methyl modified
  modified_base (19)..(19): 2'-O-methyl modified
  modified_base (20)..(20): 2'-O-methyl modified
  modified_base (21)..(21): 2'-O-methyl modified
  modified_base (22)..(22): 2'-O-methyl modified
  modified_base (23)..(23): 2'-O-methyl modified
  modified_base (24)..(24): 2'-O-methyl modified
  modified_base (25)..(25): 2'-O-methyl modified
  modified_base (26)..(26): 2'-O-methyl modified
  modified_base (27)..(27): 2'-O-methyl modified
  modified_base (28)..(28): GalNAc-conjugated
  modified_base (29)..(29): GalNAc-conjugated
  modified_base (30)..(30): GalNAc-conjugated
  modified_base (31)..(31): 2'-O-methyl modified
  modified_base (32)..(32): 2'-O-methyl modified
  modified_base (33)..(33): 2'-O-methyl modified
  modified_base (34)..(34): 2'-O-methyl modified
  modified_base (35)..(35): 2'-O-methyl modified
  modified_base (36)..(36): 2'-O-methyl modified

SEQ ID NO: 68 - RNA, 22 nt, Artificial Sequence
  synthetic construct
  misc_feature (1)..(3): linked via phosphorothioate
  modified_base (1)..(1): 5'-methoxyphosphonate-4-oxy modified
  modified_base (2)..(2): 2'-fluoro modified
  modified_base (3)..(3): 2'-fluoro modified
  modified_base (4)..(4): 2'-fluoro modified
  modified_base (5)..(5): 2'-fluoro modified
  modified_base (6)..(6): 2'-O-methyl modified
  modified_base (7)..(7): 2'-fluoro modified
  modified_base (8)..(8): 2'-O-methyl modified
  modified_base (9)..(9): 2'-O-methyl modified
  modified_base (10)..(10): 2'-fluoro modified
  modified_base (11)..(11): 2'-O-methyl modified
  modified_base (12)..(12): 2'-O-methyl modified
  modified_base (13)..(13): 2'-O-methyl modified
  modified_base (14)..(14): 2'-fluoro modified
  modified_base (15)..(15): 2'-O-methyl modified
  modified_base (16)..(16): 2'-O-methyl modified
  modified_base (17)..(17): 2'-O-methyl modified
  modified_base (18)..(18): 2'-O-methyl modified
  modified_base (19)..(19): 2'-O-methyl modified
  misc_feature (20)..(22): linked via phosphorothioate
  modified_base (20)..(20): 2'-O-methyl modified
  modified_base (21)..(21): 2'-O-methyl modified
  modified_base (22)..(22): 2'-O-methyl modified
uauaacuaaagaacauugaugg

SEQ ID NO: 69 - RNA, 36 nt, Artificial Sequence
  synthetic construct
aguuauacaauaagcugaaagcagccgaaaggcugc

SEQ ID NO: 70 - RNA, 22 nt, Artificial Sequence
  synthetic construct
uuucagcuuauuguauaacugg

SEQ ID NO: 71 - RNA, 36 nt, Artificial Sequence; identical to SEQ ID NO: 69
  synthetic construct
  misc_feature (1)..(2): linked via phosphorothioate
  modified_base (1)..(1): 2'-O-methyl modified
  modified_base (2)..(2): 2'-O-methyl modified
  modified_base (3)..(3): 2'-O-methyl modified
  modified_base (4)..(4): 2'-O-methyl modified
  modified_base (5)..(5): 2'-O-methyl modified
  modified_base (6)..(6): 2'-O-methyl modified
  modified_base (7)..(7): 2'-O-methyl modified
  modified_base (8)..(8): 2'-fluoro modified
  modified_base (9)..(9): 2'-fluoro modified
  modified_base (10)..(10): 2'-fluoro modified
  modified_base (11)..(11): 2'-fluoro modified
  modified_base (12)..(12): 2'-O-methyl modified
  modified_base (13)..(13): 2'-O-methyl modified
  modified_base (14)..(14): 2'-O-methyl modified
  modified_base (15)..(15): 2'-O-methyl modified
  modified_base (16)..(16): 2'-O-methyl modified
  modified_base (17)..(17): 2'-O-methyl modified
  modified_base (18)..(18): 2'-O-methyl modified
  modified_base (19)..(19): 2'-O-methyl modified
  modified_base (20)..(20): 2'-O-methyl modified
  modified_base (21)..(21): 2'-O-methyl modified
  modified_base (22)..(22): 2'-O-methyl modified
  modified_base (23)..(23): 2'-O-methyl modified
  modified_base (24)..(24): 2'-O-methyl modified
  modified_base (25)..(25): 2'-O-methyl modified
  modified_base (26)..(26): 2'-O-methyl modified
  modified_base (27)..(27): 2'-O-methyl modified
  modified_base (28)..(28): GalNAc-conjugated
  modified_base (29)..(29): GalNAc-conjugated
  modified_base (30)..(30): GalNAc-conjugated
  modified_base (31)..(31): 2'-O-methyl modified
  modified_base (32)..(32): 2'-O-methyl modified
  modified_base (33)..(33): 2'-O-methyl modified
  modified_base (34)..(34): 2'-O-methyl modified
  modified_base (35)..(35): 2'-O-methyl modified
  modified_base (36)..(36): 2'-O-methyl modified

SEQ ID NO: 72 - RNA, 22 nt, Artificial Sequence
  synthetic construct
  misc_feature (1)..(3): linked via phosphorothioate
  modified_base (1)..(1): 5'-methoxyphosphonate-4-oxy modified
  modified_base (2)..(2): 2'-fluoro modified
  modified_base (3)..(3): 2'-fluoro modified
  modified_base (4)..(4): 2'-fluoro modified
  modified_base (5)..(5): 2'-fluoro modified
  modified_base (6)..(6): 2'-O-methyl modified
  modified_base (7)..(7): 2'-fluoro modified
  modified_base (8)..(8): 2'-O-methyl modified
  modified_base (9)..(9): 2'-O-methyl modified
  modified_base (10)..(10): 2'-fluoro modified
  modified_base (11)..(11): 2'-O-methyl modified
  modified_base (12)..(12): 2'-O-methyl modified
  modified_base (13)..(13): 2'-O-methyl modified
  modified_base (14)..(14): 2'-fluoro modified
  modified_base (15)..(15): 2'-O-methyl modified
  modified_base (16)..(16): 2'-O-methyl modified
  modified_base (17)..(17): 2'-O-methyl modified
  modified_base (18)..(18): 2'-O-methyl modified
  modified_base (19)..(19): 2'-O-methyl modified
  misc_feature (20)..(22): linked via phosphorothioate
  modified_base (20)..(20): 2'-O-methyl modified
  modified_base (21)..(21): 2'-O-methyl modified
  modified_base (22)..(22): 2'-O-methyl modified
uuucagcuuauuguauaacugg

SEQ ID NO: 73 - RNA, 36 nt, Artificial Sequence
  synthetic construct
aguguaaaaauuuauauuaagcagccgaaaggcugc

SEQ ID NO: 74 - RNA, 22 nt, Artificial Sequence
  synthetic construct
uuaauauaaauuuuuacacugg

SEQ ID NO: 75 - RNA, 36 nt, Artificial Sequence; identical to SEQ ID NO: 73
  synthetic construct
  misc_feature (1)..(2): linked via phosphorothioate
  modified_base (1)..(1): 2'-O-methyl modified
  modified_base (2)..(2): 2'-O-methyl modified
  modified_base (3)..(3): 2'-O-methyl modified
  modified_base (4)..(4): 2'-O-methyl modified
  modified_base (5)..(5): 2'-O-methyl modified
  modified_base (6)..(6): 2'-O-methyl modified
  modified_base (7)..(7): 2'-O-methyl modified
  modified_base (8)..(8): 2'-fluoro modified
  modified_base (9)..(9): 2'-fluoro modified
  modified_base (10)..(10): 2'-fluoro modified
  modified_base (11)..(11): 2'-fluoro modified
  modified_base (12)..(12): 2'-O-methyl modified
  modified_base (13)..(13): 2'-O-methyl modified
  modified_base (14)..(14): 2'-O-methyl modified
  modified_base (15)..(15): 2'-O-methyl modified
  modified_base (16)..(16): 2'-O-methyl modified
  modified_base (17)..(17): 2'-O-methyl modified
  modified_base (18)..(18): 2'-O-methyl modified
  modified_base (19)..(19): 2'-O-methyl modified
  modified_base (20)..(20): 2'-O-methyl modified
  modified_base (21)..(21): 2'-O-methyl modified
  modified_base (22)..(22): 2'-O-methyl modified
  modified_base (23)..(23): 2'-O-methyl modified
  modified_base (24)..(24): 2'-O-methyl modified
  modified_base (25)..(25): 2'-O-methyl modified
  modified_base (26)..(26): 2'-O-methyl modified
  modified_base (27)..(27): 2'-O-methyl modified
  modified_base (28)..(28): GalNAc-conjugated
  modified_base (29)..(29): GalNAc-conjugated
  modified_base (30)..(30): GalNAc-conjugated
  modified_base (31)..(31): 2'-O-methyl modified
  modified_base (32)..(32): 2'-O-methyl modified
  modified_base (33)..(33): 2'-O-methyl modified
  modified_base (34)..(34): 2'-O-methyl modified
  modified_base (35)..(35): 2'-O-methyl modified
  modified_base (36)..(36): 2'-O-methyl modified

SEQ ID NO: 76 - RNA, 22 nt, Artificial Sequence
  synthetic construct
  misc_feature (1)..(3): linked via phosphorothioate
  modified_base (1)..(1): 5'-methoxyphosphonate-4-oxy modified
  modified_base (2)..(2): 2'-fluoro modified
  modified_base (3)..(3): 2'-fluoro modified
  modified_base (4)..(4): 2'-fluoro modified
  modified_base (5)..(5): 2'-fluoro modified
  modified_base (6)..(6): 2'-O-methyl modified
  modified_base (7)..(7): 2'-fluoro modified
  modified_base (8)..(8): 2'-O-methyl modified
  modified_base (9)..(9): 2'-O-methyl modified
  modified_base (10)..(10): 2'-fluoro modified
  modified_base (11)..(11): 2'-O-methyl modified
  modified_base (12)..(12): 2'-O-methyl modified
  modified_base (13)..(13): 2'-O-methyl modified
  modified_base (14)..(14): 2'-fluoro modified
  modified_base (15)..(15): 2'-O-methyl modified
  modified_base (16)..(16): 2'-O-methyl modified
  modified_base (17)..(17): 2'-O-methyl modified
  modified_base (18)..(18): 2'-O-methyl modified
  modified_base (19)..(19): 2'-O-methyl modified
  misc_feature (20)..(22): linked via phosphorothioate
  modified_base (20)..(20): 2'-O-methyl modified
  modified_base (21)..(21): 2'-O-methyl modified
  modified_base (22)..(22): 2'-O-methyl modified
uuaauauaaauuuuuacacugg

SEQ ID NO: 77 - RNA, 36 nt, Artificial Sequence
  synthetic construct
uuguuuguuuuuguauauuagcagccgaaaggcugc

SEQ ID NO: 78 - RNA, 22 nt, Artificial Sequence
  synthetic construct
uuaauauaaauuuuuacacugg

SEQ ID NO: 79 - RNA, 36 nt, Artificial Sequence; identical to SEQ ID NO: 77
  synthetic construct
  misc_feature (1)..(2): linked via phosphorothioate
  modified_base (1)..(1): 2'-O-methyl modified
  modified_base (2)..(2): 2'-O-methyl modified
  modified_base (3)..(3): 2'-O-methyl modified
  modified_base (4)..(4): 2'-O-methyl modified
  modified_base (5)..(5): 2'-O-methyl modified
  modified_base (6)..(6): 2'-O-methyl modified
  modified_base (7)..(7): 2'-O-methyl modified
  modified_base (8)..(8): 2'-fluoro modified
  modified_base (9)..(9): 2'-fluoro modified
  modified_base (10)..(10): 2'-fluoro modified
  modified_base (11)..(11): 2'-fluoro modified
  modified_base (12)..(12): 2'-O-methyl modified
  modified_base (13)..(13): 2'-O-methyl modified
  modified_base (14)..(14): 2'-O-methyl modified
  modified_base (15)..(15): 2'-O-methyl modified
  modified_base (16)..(16): 2'-O-methyl modified
  modified_base (17)..(17): 2'-O-methyl modified
  modified_base (18)..(18): 2'-O-methyl modified
  modified_base (19)..(19): 2'-O-methyl modified
  modified_base (20)..(20): 2'-O-methyl modified
  modified_base (21)..(21): 2'-O-methyl modified
  modified_base (22)..(22): 2'-O-methyl modified
  modified_base (23)..(23): 2'-O-methyl modified
  modified_base (24)..(24): 2'-O-methyl modified
  modified_base (25)..(25): 2'-O-methyl modified
  modified_base (26)..(26): 2'-O-methyl modified
  modified_base (27)..(27): 2'-O-methyl modified
  modified_base (28)..(28): GalNAc-conjugated
  modified_base (29)..(29): GalNAc-conjugated
  modified_base (30)..(30): GalNAc-conjugated
  modified_base (31)..(31): 2'-O-methyl modified
  modified_base (32)..(32): 2'-O-methyl modified
  modified_base (33)..(33): 2'-O-methyl modified
  modified_base (34)..(34): 2'-O-methyl modified
  modified_base (35)..(35): 2'-O-methyl modified
  modified_base (36)..(36): 2'-O-methyl modified

SEQ ID NO: 80 - RNA, 22 nt, Artificial Sequence
  synthetic construct
  misc_feature (1)..(3): linked via phosphorothioate
  modified_base (1)..(1): 5'-methoxyphosphonate-4-oxy modified
  modified_base (2)..(2): 2'-fluoro modified
  modified_base (3)..(3): 2'-fluoro modified
  modified_base (4)..(4): 2'-fluoro modified
  modified_base (5)..(5): 2'-fluoro modified
  modified_base (6)..(6): 2'-O-methyl modified
  modified_base (7)..(7): 2'-fluoro modified
  modified_base (8)..(8): 2'-O-methyl modified
  modified_base (9)..(9): 2'-O-methyl modified
  modified_base (10)..(10): 2'-fluoro modified
  modified_base (11)..(11): 2'-O-methyl modified
  modified_base (12)..(12): 2'-O-methyl modified
  modified_base (13)..(13): 2'-O-methyl modified
  modified_base (14)..(14): 2'-fluoro modified
  modified_base (15)..(15): 2'-O-methyl modified
  modified_base (16)..(16): 2'-O-methyl modified
  modified_base (17)..(17): 2'-O-methyl modified
  modified_base (18)..(18): 2'-O-methyl modified
  modified_base (19)..(19): 2'-O-methyl modified
  misc_feature (20)..(22): linked via phosphorothioate
  modified_base (20)..(20): 2'-O-methyl modified
  modified_base (21)..(21): 2'-O-methyl modified
  modified_base (22)..(22): 2'-O-methyl modified
uaauauacaaaaacaaacaagg

SEQ ID NO: 81 - RNA, 36 nt, Artificial Sequence; identical to SEQ ID NO: 65
  synthetic construct
  misc_feature (1)..(2): linked via phosphorothioate
  modified_base (1)..(1): 2'-O-methyl modified
  modified_base (2)..(2): 2'-O-methyl modified
  modified_base (3)..(3): 2'-O-methyl modified
  modified_base (4)..(4): 2'-O-methyl modified
  modified_base (5)..(5): 2'-O-methyl modified
  modified_base (6)..(6): 2'-O-methyl modified
  modified_base (7)..(7): 2'-O-methyl modified
  modified_base (8)..(8): 2'-fluoro modified
  modified_base (9)..(9): 2'-fluoro modified
  modified_base (10)..(10): 2'-fluoro modified
  modified_base (11)..(11): 2'-fluoro modified
  modified_base (12)..(12): 2'-O-methyl modified
  modified_base (13)..(13): 2'-O-methyl modified
  modified_base (14)..(14): 2'-O-methyl modified
  modified_base (15)..(15): 2'-O-methyl modified
  modified_base (16)..(16): 2'-O-methyl modified
  modified_base (17)..(17): 2'-O-methyl modified
  modified_base (18)..(18): 2'-O-methyl modified
  modified_base (19)..(19): 2'-O-methyl modified
  modified_base (20)..(20): 2'-O-methyl modified
  modified_base (21)..(21): 2'-O-methyl modified
  modified_base (22)..(22): 2'-O-methyl modified
  modified_base (23)..(23): 2'-O-methyl modified
  modified_base (24)..(24): 2'-O-methyl modified
  modified_base (25)..(25): 2'-O-methyl modified
  modified_base (26)..(26): 2'-O-methyl modified
  modified_base (27)..(27): 2'-O-methyl modified
  modified_base (28)..(28): C18 lipid conjugate attached
  modified_base (29)..(29): 2'-O-methyl modified
  modified_base (30)..(30): 2'-O-methyl modified
  modified_base (31)..(31): 2'-O-methyl modified
  modified_base (32)..(32): 2'-O-methyl modified
  modified_base (33)..(33): 2'-O-methyl modified
  modified_base (34)..(34): 2'-O-methyl modified
  modified_base (35)..(35): 2'-O-methyl modified
  modified_base (36)..(36): 2'-O-methyl modified

SEQ ID NO: 82 - RNA, 22 nt, Artificial Sequence
  synthetic construct
  misc_feature (1)..(3): linked via phosphorothioate
  modified_base (1)..(1): 5'-methoxyphosphonate-4-oxy modified
  modified_base (2)..(2): 2'-fluoro modified
  modified_base (3)..(3): 2'-fluoro modified
  modified_base (4)..(4): 2'-fluoro modified
  modified_base (5)..(5): 2'-fluoro modified
  modified_base (6)..(6): 2'-O-methyl modified
  modified_base (7)..(7): 2'-fluoro modified
  modified_base (8)..(8): 2'-O-methyl modified
  modified_base (9)..(9): 2'-O-methyl modified
  modified_base (10)..(10): 2'-fluoro modified
  modified_base (11)..(11): 2'-O-methyl modified
  modified_base (12)..(12): 2'-O-methyl modified
  modified_base (13)..(13): 2'-O-methyl modified
  modified_base (14)..(14): 2'-fluoro modified
  modified_base (15)..(15): 2'-O-methyl modified
  modified_base (16)..(16): 2'-O-methyl modified
  modified_base (17)..(17): 2'-O-methyl modified
  modified_base (18)..(18): 2'-O-methyl modified
  modified_base (19)..(19): 2'-O-methyl modified
  misc_feature (20)..(22): linked via phosphorothioate
  modified_base (20)..(20): 2'-O-methyl modified
  modified_base (21)..(21): 2'-O-methyl modified
  modified_base (22)..(22): 2'-O-methyl modified
uauaacuaaagaacauugaugg

SEQ ID NO: 83 - RNA, 36 nt, Artificial Sequence; identical to SEQ ID NO: 69
  synthetic construct
  misc_feature (1)..(2): linked via phosphorothioate
  modified_base (1)..(1): 2'-O-methyl modified
  modified_base (2)..(2): 2'-O-methyl modified
  modified_base (3)..(3): 2'-O-methyl modified
  modified_base (4)..(4): 2'-O-methyl modified
  modified_base (5)..(5): 2'-O-methyl modified
  modified_base (6)..(6): 2'-O-methyl modified
  modified_base (7)..(7): 2'-O-methyl modified
  modified_base (8)..(8): 2'-fluoro modified
  modified_base (9)..(9): 2'-fluoro modified
  modified_base (10)..(10): 2'-fluoro modified
  modified_base (11)..(11): 2'-fluoro modified
  modified_base (12)..(12): 2'-O-methyl modified
  modified_base (13)..(13): 2'-O-methyl modified
  modified_base (14)..(14): 2'-O-methyl modified
  modified_base (15)..(15): 2'-O-methyl modified
  modified_base (16)..(16): 2'-O-methyl modified
  modified_base (17)..(17): 2'-O-methyl modified
  modified_base (18)..(18): 2'-O-methyl modified
  modified_base (19)..(19): 2'-O-methyl modified
  modified_base (20)..(20): 2'-O-methyl modified
  modified_base (21)..(21): 2'-O-methyl modified
  modified_base (22)..(22): 2'-O-methyl modified
  modified_base (23)..(23): 2'-O-methyl modified
  modified_base (24)..(24): 2'-O-methyl modified
  modified_base (25)..(25): 2'-O-methyl modified
  modified_base (26)..(26): 2'-O-methyl modified
  modified_base (27)..(27): 2'-O-methyl modified
  modified_base (28)..(28): C18 lipid conjugate attached
  modified_base (29)..(29): 2'-O-methyl modified
  modified_base (30)..(30): 2'-O-methyl modified
  modified_base (31)..(31): 2'-O-methyl modified
  modified_base (32)..(32): 2'-O-methyl modified
  modified_base (33)..(33): 2'-O-methyl modified
  modified_base (34)..(34): 2'-O-methyl modified
  modified_base (35)..(35): 2'-O-methyl modified
  modified_base (36)..(36): 2'-O-methyl modified

SEQ ID NO: 84 - RNA, 22 nt, Artificial Sequence
  synthetic construct
  misc_feature (1)..(3): linked via phosphorothioate
  modified_base (1)..(1): 5'-methoxyphosphonate-4-oxy modified
  modified_base (2)..(2): 2'-fluoro modified
  modified_base (3)..(3): 2'-fluoro modified
  modified_base (4)..(4): 2'-fluoro modified
  modified_base (5)..(5): 2'-fluoro modified
  modified_base (6)..(6): 2'-O-methyl modified
  modified_base (7)..(7): 2'-fluoro modified
  modified_base (8)..(8): 2'-O-methyl modified
  modified_base (9)..(9): 2'-O-methyl modified
  modified_base (10)..(10): 2'-fluoro modified
  modified_base (11)..(11): 2'-O-methyl modified
  modified_base (12)..(12): 2'-O-methyl modified
  modified_base (13)..(13): 2'-O-methyl modified
  modified_base (14)..(14): 2'-fluoro modified
  modified_base (15)..(15): 2'-O-methyl modified
  modified_base (16)..(16): 2'-O-methyl modified
  modified_base (17)..(17): 2'-O-methyl modified
  modified_base (18)..(18): 2'-O-methyl modified
  modified_base (19)..(19): 2'-O-methyl modified
  misc_feature (20)..(22): linked via phosphorothioate
  modified_base (20)..(20): 2'-O-methyl modified
  modified_base (21)..(21): 2'-O-methyl modified
  modified_base (22)..(22): 2'-O-methyl modified
uuucagcuuauuguauaacugg

SEQ ID NO: 85 - DNA, 4899 bp, Homo sapiens
gtcgcagccgagggaacaagccccaaccggatcctggacaggcaccccggcttggcgctgtctctccccctcggctcggagaggcccttcggcctgagggagcctcgccgcccgtccccggcacacgcgcagccccggcctctcggcctctgccggagaaacaggatggcccaatggaatcagctacagcagcttgacacacggtacctggagcagctccatcagctctacagtgacagcttcccaatggagctgcggcagtttctggccccttggattgagagtcaagattgggcatatgcggccagcaaagaatcacatgccactttggtgtttcataatctcctgggagagattgaccagcagtatagccgcttcctgcaagagtcgaatgttctctatcagcacaatctacgaagaatcaagcagtttcttcagagcaggtatcttgagaagccaatggagattgcccggattgtggcccggtgcctgtgggaagaatcacgccttctacagactgcagccactgcggcccagcaagggggccaggccaaccaccccacagcagccgtggtgacggagaagcagcagatgctggagcagcaccttcaggatgtccggaagagagtgcaggatctagaacagaaaatgaaagtggtagagaatctccaggatgactttgatttcaactataaaaccctcaagagtcaaggagacatgcaagatctgaatggaaacaaccagtcagtgaccaggcagaagatgcagcagctggaacagatgctcactgcgctggaccagatgcggagaagcatcgtgagtgagctggcggggcttttgtcagcgatggagtacgtgcagaaaactctcacggacgaggagctggctgactggaagaggcggcaacagattgcctgcattggaggcccgcccaacatctgcctagatcggctagaaaactggataacgtcattagcagaatctcaacttcagacccgtcaacaaattaagaaactggaggagttgcagcaaaaagtttcctacaaaggggaccccattgtacagcaccggccgatgctggaggagagaatcgtggagctgtttagaaacttaatgaaaagtgcctttgtggtggagcggcagccctgcatgcccatgcatcctgaccggcccctcgtcatcaagaccggcgtccagttcactactaaagtcaggttgctggtcaaattccctgagttgaattatcagcttaaaattaaagtgtgcattgacaaagactctggggacgttgcagctctcagaggatcccggaaatttaacattctgggcacaaacacaaaagtgatgaacatggaagaatccaacaacggcagcctctctgcagaattcaaacacttgaccctgagggagcagagatgtgggaatgggggccgagccaattgtgatgcttccctgattgtgactgaggagctgcacctgatcacctttgagaccgaggtgtatcaccaaggcctcaagattgacctagagacccactccttgccagttgtggtgatctccaacatctgtcagatgccaaatgcctgggcgtccatcctgtggtacaacatgctgaccaacaatcccaagaatgtaaacttttttaccaagcccccaattggaacctgggatcaagtggccgaggtcctgagctggcagttctcctccaccaccaagcgaggactgagcatcgagcagctgactacactggcagagaaactcttgggacctggtgtgaattattcagggtgtcagatcacatgggctaaattttgcaaagaaaacatggctggcaagggcttctccttctgggtctggctggacaatatcattgaccttgtgaaaaagtacatcctggccctttggaacgaagggtacatcatgggctttatcagtaaggagcgggagcgggccatcttgagcactaagcctccaggcaccttcctgctaagattcagtgaaagcagcaaagaaggaggcgtcactttcacttgggtggagaaggacatcagcggtaagacccagatccagtccgtggaaccatacacaaagcagcagctgaacaacatgtcatttgctgaaatcatcatgggctataagatcatggatgctaccaatatcctggtgtctccactggtctatctctatcctgacattcccaaggaggaggcattcggaaagtattgtcggccagagagccaggagcatcctgaagctgacccaggtagcgctgccccatacctgaagaccaagtttatctgtgtgacaccaacgacctgcagcaataccattgacctgccgatgtccccccgcactttagattcattgatgcagtttggaaataatggtgaaggtgctgaaccctcagcaggagggcagtttgagtccctcacctttgacatggagttgacctcggagtgcgctacctcccccatgtgaggagctgagaacggaagctgcagaaagatacgactgaggcgcctacctgcattctgccacccctcacacagccaaaccccagatcatctgaaactactaactttgtggttccagattttttttaatctcctacttctgctatctttgagcaatctgggcacttttaaaaatagagaaatgagtgaatgtgggtgatctgcttttatctaaatgcaaataaggatgtgttctctgagacccatgatcaggggatgtggcggggggtggctagagggagaaaaaggaaatgtcttgtgttgttttgttcccctgccctcctttctcagcagctttttgttattgttgttgttgttcttagacaagtgcctcctggtgcctgcggcatccttctgcctgtttctgtaagcaaatgccacaggccacctatagctacatactcctggcattgcactttttaaccttgctgacatccaaatagaagataggactatctaagccctaggtttctttttaaattaagaaataataacaattaaagggcaaaaaacactgtatcagcatagcctttctgtatttaagaaacttaagcagccgggcatggtggctcacgcctgtaatcccagcactttgggaggccgaggcggatcataaggtcaggagatcaagaccatcctggctaacacggtgaaaccccgtctctactaaaagtacaaaaaattagctgggtgtggtggtgggcgcctgtagtcccagctactcgggaggctgaggcaggagaatcgcttgaacctgagaggcggaggttgcagtgagccaaaattgcaccactgcacactgcactccatcctgggcgacagtctgagactctgtctcaaaaaaaaaaaaaaaaaaaagaaacttcagttaacagcctccttggtgctttaagcattcagcttccttcaggctggtaatttatataatccctgaaacgggcttcaggtcaaacccttaagacatctgaagctgcaacctggcctttggtgttgaaataggaaggtttaaggagaatctaagcattttagacttttttttataaatagacttattttcctttgtaatgtattggccttttagtgagtaaggctgggcagagggtgcttacaaccttgactccctttctccctggacttgatctgctgtttcagaggctaggttgtttctgtgggtgccttatcagggctgggatacttctgattctggcttccttcctgccccaccctcccgaccccagtccccctgatcctgctagaggcatgtctccttgcgtgtctaaaggtccctcatcctgtttgttttaggaatcctggtctcaggacctcatggaagaagagggggagagagttacaggttggacatgatgcacactatggggccccagcgacgtgtctggttgagctcagggaatatggttcttagccagtttcttggtgatatccagtggcacttgtaatggcgtcttcattcagttcatgcagggcaaaggcttactgataaacttgagtctgccctcgtatgagggtgtatacctggcctccctctgaggctggtgactcctccctgctggggccccacaggtgaggcagaacagctagagggcctccccgcctgcccgccttggctggctagctcgcctctcctgtgcgtatgggaacacctagcacgtgctggatgggctgcctctgactcagaggcatggccggatttggcaactcaaaaccaccttgcctcagctgatcagagtttctgtggaattctgtttgttaaatcaaattagctggtctctgaattaagggggagacgaccttctctaagatgaacagggttcgccccagtcctcctgcctggagacagttgatgtgtcatgcagagctcttacttctccagcaacactcttcagtacataataagcttaactgataaacagaatatttagaaaggtgagacttgggcttaccattgggtttaaatcatagggacctagggcgagggttcagggcttctctggagcagatattgtcaagttcatggccttaggtagcatgtatctggtcttaactctgattgtagcaaaagttctgagaggagctgagccctgttgtggcccattaaagaacagggtcctcaggccctgcccgcttcctgtccactgccccctccccatccccagcccagccgagggaatcccgtgggttgcttacctacctataaggtggtttataagctgctgtcctggccactgcattcaaattccaatgtgtacttcatagtgtaaaaatttatattattgtgaggttttttgtcttttttttttttttttttttttggtatattgctgtatctactttaacttccagaaataaacgttatataggaaccgtc

SEQ ID NO: 86 - RNA, 16 nt, Artificial Sequence
  synthetic construct
gcagccgaaaggcugc

SEQ ID NO: 87 - RNA, 36 nt, Artificial Sequence; identical to SEQ ID NO: 65
  synthetic construct
  misc_feature (1)..(2): linked via phosphorothioate
  modified_base (1)..(1): 2'-O-methyl modified
  modified_base (2)..(2): 2'-O-methyl modified
  modified_base (3)..(3): 2'-O-methyl modified
  modified_base (4)..(4): 2'-O-methyl modified
  modified_base (5)..(5): 2'-O-methyl modified
  modified_base (6)..(6): 2'-O-methyl modified
  modified_base (7)..(7): 2'-O-methyl modified
  modified_base (8)..(8): 2'-fluoro modified
  modified_base (9)..(9): 2'-fluoro modified
  modified_base (10)..(10): 2'-fluoro modified
  modified_base (11)..(11): 2'-fluoro modified
  modified_base (12)..(12): 2'-O-methyl modified
  modified_base (13)..(13): 2'-O-methyl modified
  modified_base (14)..(14): 2'-O-methyl modified
  modified_base (15)..(15): 2'-O-methyl modified
  modified_base (16)..(16): 2'-O-methyl modified
  modified_base (17)..(17): 2'-O-methyl modified
  modified_base (18)..(18): 2'-O-methyl modified
  modified_base (19)..(19): 2'-O-methyl modified
  modified_base (20)..(20): 2'-O-methyl modified
  modified_base (21)..(21): 2'-O-methyl modified
  modified_base (22)..(22): 2'-O-methyl modified
  modified_base (23)..(23): 2'-O-methyl modified
  modified_base (24)..(24): 2'-O-methyl modified
  modified_base (25)..(25): 2'-O-methyl modified
  modified_base (26)..(26): 2'-O-methyl modified
  modified_base (27)..(27): 2'-O-methyl modified
  modified_base (28)..(28): C18 lipid conjugate attached
  modified_base (29)..(29): 2'-O-methyl modified
  modified_base (30)..(30): 2'-O-methyl modified
  modified_base (31)..(31): 2'-O-methyl modified
  modified_base (32)..(32): 2'-O-methyl modified
  modified_base (33)..(33): 2'-O-methyl modified
  modified_base (34)..(34): 2'-O-methyl modified
  modified_base (35)..(35): 2'-O-methyl modified
  modified_base (36)..(36): 2'-O-methyl modified

SEQ ID NO: 88 - RNA, 36 nt, Artificial Sequence; identical to SEQ ID NO: 69
  synthetic construct
  misc_feature (1)..(3): linked via phosphorothioate
  modified_base (1)..(1): 2'-O-methyl modified
  modified_base (2)..(2): 2'-O-methyl modified
  modified_base (3)..(3): 2'-O-methyl modified
  modified_base (4)..(4): 2'-O-methyl modified
  modified_base (5)..(5): 2'-O-methyl modified
  modified_base (6)..(6): 2'-O-methyl modified
  modified_base (7)..(7): 2'-O-methyl modified
  modified_base (8)..(8): 2'-fluoro modified
  modified_base (9)..(9): 2'-fluoro modified
  modified_base (10)..(10): 2'-fluoro modified
  modified_base (11)..(11): 2'-fluoro modified
  modified_base (12)..(12): 2'-O-methyl modified
  modified_base (13)..(13): 2'-O-methyl modified
  modified_base (14)..(14): 2'-O-methyl modified
  modified_base (15)..(15): 2'-O-methyl modified
  modified_base (16)..(16): 2'-O-methyl modified
  modified_base (17)..(17): 2'-O-methyl modified
  modified_base (18)..(18): 2'-O-methyl modified
  modified_base (19)..(19): 2'-O-methyl modified
  modified_base (20)..(20): 2'-O-methyl modified
  modified_base (21)..(21): 2'-O-methyl modified
  modified_base (22)..(22): 2'-O-methyl modified
  modified_base (23)..(23): 2'-O-methyl modified
  modified_base (24)..(24): 2'-O-methyl modified
  modified_base (25)..(25): 2'-O-methyl modified
  modified_base (26)..(26): 2'-O-methyl modified
  modified_base (27)..(27): 2'-O-methyl modified
  modified_base (28)..(28): C18 lipid conjugate attached
  modified_base (29)..(29): 2'-O-methyl modified
  modified_base (30)..(30): 2'-O-methyl modified
  modified_base (31)..(31): 2'-O-methyl modified
  modified_base (32)..(32): 2'-O-methyl modified
  modified_base (33)..(33): 2'-O-methyl modified
  modified_base (34)..(34): 2'-O-methyl modified
  modified_base (35)..(35): 2'-O-methyl modified
  modified_base (36)..(36): 2'-O-methyl modified

SEQ ID NO: 89 - RNA, 19 nt, Artificial Sequence
  synthetic construct
cacuuugguguuucauaau

SEQ ID NO: 90 - RNA, 19 nt, Artificial Sequence
  synthetic construct
cuuugguguuucauaaucu

SEQ ID NO: 91 - RNA, 19 nt, Artificial Sequence
  synthetic construct
ccugcaagagucgaauguu

SEQ ID NO: 92 - RNA, 19 nt, Artificial Sequence
  synthetic construct
cugcaagagucgaauguuc

SEQ ID NO: 93 - RNA, 19 nt, Artificial Sequence
  synthetic construct
ugcaagagucgaauguucu

SEQ ID NO: 94 - RNA, 19 nt, Artificial Sequence
  synthetic construct
aagagucgaauguucucua

SEQ ID NO: 95 - RNA, 19 nt, Artificial Sequence
  synthetic construct
agagucgaauguucucuau

SEQ ID NO: 96 - RNA, 19 nt, Artificial Sequence
  synthetic construct
agucgaauguucucuauca

SEQ ID NO: 97 - RNA, 19 nt, Artificial Sequence
  synthetic construct
gucgaauguucucuaucag

SEQ ID NO: 98 - RNA, 19 nt, Artificial Sequence
  synthetic construct
acgaagaaucaagcaguuu

SEQ ID NO: 99 - RNA, 19 nt, Artificial Sequence
  synthetic construct
cgaagaaucaagcaguuuc

SEQ ID NO: 100 - RNA, 19 nt, Artificial Sequence
  synthetic construct
gaagaaucaagcaguuucu

SEQ ID NO: 101 - RNA, 19 nt, Artificial Sequence
  synthetic construct
aucuugagaagccaaugga

SEQ ID NO: 102 - RNA, 19 nt, Artificial Sequence
  synthetic construct
aggaucuagaacagaaaau

SEQ ID NO: 103 - RNA, 19 nt, Artificial Sequence
  synthetic construct
aucuagaacagaaaaugaa

SEQ ID NO: 104 - RNA, 19 nt, Artificial Sequence
  synthetic construct
ccaggaugacuuugauuuc

SEQ ID NO: 105 - RNA, 19 nt, Artificial Sequence
  synthetic construct
caggaugacuuugauuuca

SEQ ID NO: 106 - RNA, 19 nt, Artificial Sequence
  synthetic construct
aggaugacuuugauuucaa

SEQ ID NO: 107 - RNA, 19 nt, Artificial Sequence
  synthetic construct
augacuuugauuucaacua

SEQ ID NO: 108 - RNA, 19 nt, Artificial Sequence
  synthetic construct
ugacuuugauuucaacuau

SEQ ID NO: 109 - RNA, 19 nt, Artificial Sequence
  synthetic construct
gacuuugauuucaacuaua

SEQ ID NO: 110 - RNA, 19 nt, Artificial Sequence
  synthetic construct
acuuugauuucaacuauaa

SEQ ID NO: 111 - RNA, 19 nt, Artificial Sequence
  synthetic construct
cuuugauuucaacuauaaa

SEQ ID NO: 112 - RNA, 19 nt, Artificial Sequence
  synthetic construct
aagaucugaauggaaacaa

SEQ ID NO: 113 - RNA, 19 nt, Artificial Sequence
  synthetic construct
aucugaauggaaacaacca

SEQ ID NO: 114 - RNA, 19 nt, Artificial Sequence
  synthetic construct
cugaauggaaacaaccagu

SEQ ID NO: 115 - RNA, 19 nt, Artificial Sequence
  synthetic construct
agaaaacuggauaacguca

SEQ ID NO: 116 - RNA, 19 nt, Artificial Sequence
  synthetic construct
gaaaacuggauaacgucau

SEQ ID NO: 117 - RNA, 19 nt, Artificial Sequence
  synthetic construct
aaacuggauaacgucauua

SEQ ID NO: 118 - RNA, 19 nt, Artificial Sequence
  synthetic construct
cuggauaacgucauuagca

SEQ ID NO: 119 - RNA, 19 nt, Artificial Sequence
  synthetic construct
ggauaacgucauuagcaga

SEQ ID NO: 120 - RNA, 19 nt, Artificial Sequence
  synthetic construct
gauaacgucauuagcagaa

SEQ ID NO: 121 - RNA, 19 nt, Artificial Sequence
  synthetic construct
auaacgucauuagcagaau

SEQ ID NO: 122 - RNA, 19 nt, Artificial Sequence
  synthetic construct
aacaaauuaagaaacugga

SEQ ID NO: 123 - RNA, 19 nt, Artificial Sequence
  synthetic construct
gaguugcagcaaaaaguuu

SEQ ID NO: 124 - RNA, 19 nt, Artificial Sequence
  synthetic construct
aguugcagcaaaaaguuuc

SEQ ID NO: 125 - RNA, 19 nt, Artificial Sequence
  synthetic construct
cuguuuagaaacuuaauga

SEQ ID NO: 126 - RNA, 19 nt, Artificial Sequence
  synthetic construct
agaaacuuaaugaaaagug

SEQ ID NO: 127 - RNA, 19 nt, Artificial Sequence
  synthetic construct
caguucacuacuaaaguca

SEQ ID NO: 128 - RNA, 19 nt, Artificial Sequence
  synthetic construct
gucaaauucccugaguuga

SEQ ID NO: 129 - RNA, 19 nt, Artificial Sequence
  synthetic construct
aauucccugaguugaauua

SEQ ID NO: 130 - RNA, 19 nt, Artificial Sequence
  synthetic construct
auucccugaguugaauuau

SEQ ID NO: 131 - RNA, 19 nt, Artificial Sequence
  synthetic construct
ucccugaguugaauuauca

SEQ ID NO: 132 - RNA, 19 nt, Artificial Sequence
  synthetic construct
ccugaguugaauuaucagc

SEQ ID NO: 133 - RNA, 19 nt, Artificial Sequence
  synthetic construct
cugaguugaauuaucagcu

SEQ ID NO: 134 - RNA, 19 nt, Artificial Sequence
  synthetic construct
ugaguugaauuaucagcuu

SEQ ID NO: 135 - RNA, 19 nt, Artificial Sequence
  synthetic construct
gaguugaauuaucagcuua

SEQ ID NO: 136 - RNA, 19 nt, Artificial Sequence
  synthetic construct
aguugaauuaucagcuuaa

SEQ ID NO: 137 - RNA, 19 nt, Artificial Sequence
  synthetic construct
guugaauuaucagcuuaaa

SEQ ID NO: 138 - RNA, 19 nt, Artificial Sequence
  synthetic construct
uugaauuaucagcuuaaaa

SEQ ID NO: 139 - RNA, 19 nt, Artificial Sequence
  synthetic construct
ugaauuaucagcuuaaaau

SEQ ID NO: 140 - RNA, 19 nt, Artificial Sequence
  synthetic construct
aauuaucagcuuaaaauua

SEQ ID NO: 141 - RNA, 19 nt, Artificial Sequence
  synthetic construct
auuaucagcuuaaaauuaa

SEQ ID NO: 142 - RNA, 19 nt, Artificial Sequence
  synthetic construct
cagcuuaaaauuaaagugu

SEQ ID NO: 143 - RNA, 19 nt, Artificial Sequence
  synthetic construct
agcuuaaaauuaaagugug

SEQ ID NO: 144 - RNA, 19 nt, Artificial Sequence
  synthetic construct
aaauuaaagugugcauuga

SEQ ID NO: 145 - RNA, 19 nt, Artificial Sequence
  synthetic construct
aagugugcauugacaaaga

SEQ ID NO: 146 - RNA, 19 nt, Artificial Sequence
  synthetic construct
caaaagugaugaacaugga

SEQ ID NO: 147 - RNA, 19 nt, Artificial Sequence
  synthetic construct
gugaugaacauggaagaau

SEQ ID NO: 148 - RNA, 19 nt, Artificial Sequence
  synthetic construct
gcagaauucaaacacuuga

SEQ ID NO: 149 - RNA, 19 nt, Artificial Sequence
  synthetic construct
auugugaugcuucccugau

SEQ ID NO: 150 - RNA, 19 nt, Artificial Sequence
  synthetic construct
ccuugccaguuguggugau

SEQ ID NO: 151 - RNA, 19 nt, Artificial Sequence
  synthetic construct
uugccaguuguggugaucu

SEQ ID NO: 152 - RNA, 19 nt, Artificial Sequence
  synthetic construct
cccaagaauguaaacuuuu

SEQ ID NO: 153 - RNA, 19 nt, Artificial Sequence
  synthetic construct
ccaagaauguaaacuuuuu

SEQ ID NO: 154 - RNA, 19 nt, Artificial Sequence
  synthetic construct
caagaauguaaacuuuuuu

SEQ ID NO: 155 - RNA, 19 nt, Artificial Sequence
  synthetic construct
aagaauguaaacuuuuuua

SEQ ID NO: 156 - RNA, 19 nt, Artificial Sequence
  synthetic construct
agaauguaaacuuuuuuac

SEQ ID NO: 157 - RNA, 19 nt, Artificial Sequence
  synthetic construct
aauguaaacuuuuuuacca

SEQ ID NO: 158 - RNA, 19 nt, Artificial Sequence
  synthetic construct
accuggugugaauuauuca

SEQ ID NO: 159 - RNA, 19 nt, Artificial Sequence
  synthetic construct
cuggugugaauuauucagg

SEQ ID NO: 160 - RNA, 19 nt, Artificial Sequence
  synthetic construct
ggugugaauuauucagggu

SEQ ID NO: 161 - RNA, 19 nt, Artificial Sequence
  synthetic construct
ugugaauuauucagggugu

SEQ ID NO: 162 - RNA, 19 nt, Artificial Sequence
  synthetic construct
cuggacaauaucauugacc

SEQ ID NO: 163 - RNA, 19 nt, Artificial Sequence
  synthetic construct
ggacaauaucauugaccuu

SEQ ID NO: 164 - RNA, 19 nt, Artificial Sequence
  synthetic construct
gacaauaucauugaccuug

SEQ ID NO: 165 - RNA, 19 nt, Artificial Sequence
  synthetic construct
acaauaucauugaccuugu

SEQ ID NO: 166 - RNA, 19 nt, Artificial Sequence
  synthetic construct
caauaucauugaccuugug

SEQ ID NO: 167 - RNA, 19 nt, Artificial Sequence
  synthetic construct
aauaucauugaccuuguga

SEQ ID NO: 168 - RNA, 19 nt, Artificial Sequence
  synthetic construct
auaucauugaccuugugaa

SEQ ID NO: 169 - RNA, 19 nt, Artificial Sequence
  synthetic construct
uaucauugaccuugugaaa

SEQ ID NO: 170 - RNA, 19 nt, Artificial Sequence
  synthetic construct
aucauugaccuugugaaaa

SEQ ID NO: 171 - RNA, 19 nt, Artificial Sequence
  synthetic construct
ucauugaccuugugaaaaa

SEQ ID NO: 172 - RNA, 19 nt, Artificial Sequence
  synthetic construct
auugaccuugugaaaaagu

SEQ ID NO: 173 - RNA, 19 nt, Artificial Sequence
  synthetic construct
uugaccuugugaaaaagua

SEQ ID NO: 174 - RNA, 19 nt, Artificial Sequence
  synthetic construct
gaccuugugaaaaaguaca

SEQ ID NO: 175 - RNA, 19 nt, Artificial Sequence
  synthetic construct
accuugugaaaaaguacau

SEQ ID NO: 176 - RNA, 19 nt, Artificial Sequence
  synthetic construct
accuuccugcuaagauuca

SEQ ID NO: 177 - RNA, 19 nt, Artificial Sequence
  synthetic construct
aagcagcagcugaacaaca

SEQ ID NO: 178 - RNA, 19 nt, Artificial Sequence
  synthetic construct
agcagcagcugaacaacau

SEQ ID NO: 179 - RNA, 19 nt, Artificial Sequence
  synthetic construct
cagcagcugaacaacaugu

SEQ ID NO: 180 - RNA, 19 nt, Artificial Sequence
  synthetic construct
agcagcugaacaacauguc

SEQ ID NO: 181 - RNA, 19 nt, Artificial Sequence
  synthetic construct
gcugaacaacaugucauuu

SEQ ID NO: 182 - RNA, 19 nt, Artificial Sequence
  synthetic construct
cugaacaacaugucauuug

SEQ ID NO: 183 - RNA, 19 nt, Artificial Sequence
  synthetic construct
ugaacaacaugucauuugc

SEQ ID NO: 184 - RNA, 19 nt, Artificial Sequence
  synthetic construct
gaacaacaugucauuugcu

SEQ ID NO: 185 - RNA, 19 nt, Artificial Sequence
  synthetic construct
aacaacaugucauuugcug

SEQ ID NO: 186 - RNA, 19 nt, Artificial Sequence
  synthetic construct
acaacaugucauuugcuga

SEQ ID NO: 187 - RNA, 19 nt, Artificial Sequence
  synthetic construct
acaugucauuugcugaaau

SEQ ID NO: 188 - RNA, 19 nt, Artificial Sequence
  synthetic construct
augucauuugcugaaauca

SEQ ID NO: 189 - RNA, 19 nt, Artificial Sequence
  synthetic construct
ugucauuugcugaaaucau

SEQ ID NO: 190 - RNA, 19 nt, Artificial Sequence
  synthetic construct
uuugcugaaaucaucaugg

SEQ ID NO: 191 - RNA, 19 nt, Artificial Sequence
  synthetic construct
cauaccugaagaccaaguu

SEQ ID NO: 192 - RNA, 19 nt, Artificial Sequence
  synthetic construct
accugaagaccaaguuuau

SEQ ID NO: 193 - RNA, 19 nt, Artificial Sequence
  synthetic construct
cugaagaccaaguuuaucu

SEQ ID NO: 194 - RNA, 19 nt, Artificial Sequence
  synthetic construct
gaagaccaaguuuaucugu

SEQ ID NO: 195 - RNA, 19 nt, Artificial Sequence
  synthetic construct
accaaguuuaucuguguga

SEQ ID NO: 196 - RNA, 19 nt, Artificial Sequence
  synthetic construct
caaguuuaucugugugaca

SEQ ID NO: 197 - RNA, 19 nt, Artificial Sequence
  synthetic construct
agauucauugaugcaguuu

SEQ ID NO: 198 - RNA, 19 nt, Artificial Sequence
  synthetic construct
gauucauugaugcaguuug

SEQ ID NO: 199 - RNA, 19 nt, Artificial Sequence
  synthetic construct
uucauugaugcaguuugga

SEQ ID NO: 200 - RNA, 19 nt, Artificial Sequence
  synthetic construct
ucauugaugcaguuuggaa

SEQ ID NO: 201 - RNA, 19 nt, Artificial Sequence
  synthetic construct
uugaugcaguuuggaaaua

SEQ ID NO: 202 - RNA, 19 nt, Artificial Sequence
  synthetic construct
ugaugcaguuuggaaauaa

SEQ ID NO: 203 - RNA, 19 nt, Artificial Sequence
  synthetic construct
gaugcaguuuggaaauaau

SEQ ID NO: 204 - RNA, 19 nt, Artificial Sequence
  synthetic construct
gcaguuuggaaauaauggu

SEQ ID NO: 205 - RNA, 19 nt, Artificial Sequence
  synthetic construct
aguuuggaaauaaugguga

SEQ ID NO: 206 - RNA, 19 nt, Artificial Sequence
  synthetic construct
uggaaauaauggugaaggu

SEQ ID NO: 207 - RNA, 19 nt, Artificial Sequence
  synthetic construct
auaauggugaaggugcuga

SEQ ID NO: 208 - RNA, 19 nt, Artificial Sequence
  synthetic construct
cugaaacuacuaacuuugu

SEQ ID NO: 209 - RNA, 19 nt, Artificial Sequence
  synthetic construct
aaacuacuaacuuuguggu

SEQ ID NO: 210 - RNA, 19 nt, Artificial Sequence
  synthetic construct
aacuacuaacuuugugguu

SEQ ID NO: 211 - RNA, 19 nt, Artificial Sequence
  synthetic construct
acuacuaacuuugugguuc

SEQ ID NO: 212 - RNA, 19 nt, Artificial Sequence
  synthetic construct
uaacuuugugguuccagau

SEQ ID NO: 213 - RNA, 19 nt, Artificial Sequence
  synthetic construct
cuuugugguuccagauuuu

SEQ ID NO: 214 - RNA, 19 nt, Artificial Sequence
  synthetic construct
uuugugguuccagauuuuu

SEQ ID NO: 215 - RNA, 19 nt, Artificial Sequence
  synthetic construct
uugugguuccagauuuuuu

SEQ ID NO: 216 - RNA, 19 nt, Artificial Sequence
  synthetic construct
aaauagagaaaugagugaa

SEQ ID NO: 217 - RNA, 19 nt, Artificial Sequence
  synthetic construct
aauagagaaaugagugaau

SEQ ID NO: 218 - RNA, 19 nt, Artificial Sequence
  synthetic construct
ggugaucugcuuuuaucua

SEQ ID NO: 219 - RNA, 19 nt, Artificial Sequence
  synthetic construct
aucugcuuuuaucuaaaug

SEQ ID NO: 220 - RNA, 19 nt, Artificial Sequence
  synthetic construct
cugcuuuuaucuaaaugca

SEQ ID NO: 221 - RNA, 19 nt, Artificial Sequence
  synthetic construct
augcaaauaaggauguguu

SEQ ID NO: 222 - RNA, 19 nt, Artificial Sequence
  synthetic construct
auaaggauguguucucuga

SEQ ID NO: 223 - RNA, 19 nt, Artificial Sequence
  synthetic construct
gaaaaaggaaaugucuugu

SEQ ID NO: 224 - RNA, 19 nt, Artificial Sequence
  synthetic construct
aaaaggaaaugucuugugu

SEQ ID NO: 225 - RNA, 19 nt, Artificial Sequence
  synthetic construct
aaaggaaaugucuuguguu

SEQ ID NO: 226 - RNA, 19 nt, Artificial Sequence
  synthetic construct
aggaaaugucuuguguugu

SEQ ID NO: 227 - RNA, 19 nt, Artificial Sequence
  synthetic construct
ggaaaugucuuguguuguu

SEQ ID NO: 228 - RNA, 19 nt, Artificial Sequence
  synthetic construct
gaaaugucuuguguuguuu

SEQ ID NO: 229 - RNA, 19 nt, Artificial Sequence
  synthetic construct
aaaugucuuguguuguuuu

SEQ ID NO: 230 - RNA, 19 nt, Artificial Sequence
  synthetic construct
aaugucuuguguuguuuug

SEQ ID NO: 231 - RNA, 19 nt, Artificial Sequence
  synthetic construct
augucuuguguuguuuugu

SEQ ID NO: 232 - RNA, 19 nt, Artificial Sequence
  synthetic construct
ugucuuguguuguuuuguu

SEQ ID NO: 233 - RNA, 19 nt, Artificial Sequence
  synthetic construct
gucuuguguuguuuuguuc

SEQ ID NO: 234 - RNA, 19 nt, Artificial Sequence
  synthetic construct
cucagcagcuuuuuguuau

SEQ ID NO: 235 - RNA, 19 nt, Artificial Sequence
  synthetic construct
cagcagcuuuuuguuauug

SEQ ID NO: 236 - RNA, 19 nt, Artificial Sequence
  synthetic construct
agcagcuuuuuguuauugu

SEQ ID NO: 237 - RNA, 19 nt, Artificial Sequence
  synthetic construct
gcagcuuuuuguuauuguu

SEQ ID NO: 238 - RNA, 19 nt, Artificial Sequence
  synthetic construct
cagcuuuuuguuauuguug

SEQ ID NO: 239 - RNA, 19 nt, Artificial Sequence
  synthetic construct
agcuuuuuguuauuguugu

SEQ ID NO: 240 - RNA, 19 nt, Artificial Sequence
  synthetic construct
gcuuuuuguuauuguuguu

SEQ ID NO: 241 - RNA, 19 nt, Artificial Sequence
  synthetic construct
cuuuuuguuauuguuguug

SEQ ID NO: 242 - RNA, 19 nt, Artificial Sequence
  synthetic construct
uuuuuguuauuguuguugu

SEQ ID NO: 243 - RNA, 19 nt, Artificial Sequence
  synthetic construct
uuuuguuauuguuguuguu

SEQ ID NO: 244 - RNA, 19 nt, Artificial Sequence
  synthetic construct
uuuguuauuguuguuguug

SEQ ID NO: 245 - RNA, 19 nt, Artificial Sequence
  synthetic construct
uuguuauuguuguuguugu

SEQ ID NO: 246 - RNA, 19 nt, Artificial Sequence
  synthetic construct
uguuauuguuguuguuguu

SEQ ID NO: 247 - RNA, 19 nt, Artificial Sequence
  synthetic construct
guuauuguuguuguuguuc

SEQ ID NO: 248 - RNA, 19 nt, Artificial Sequence
  synthetic construct
uuauuguuguuguuguucu

SEQ ID NO: 249 - RNA, 19 nt, Artificial Sequence
  synthetic construct
uauuguuguuguuguucuu

SEQ ID NO: 250 - RNA, 19 nt, Artificial Sequence
  synthetic construct
auuguuguuguuguucuua

SEQ ID NO: 251 - RNA, 19 nt, Artificial Sequence
  synthetic construct
uguuguuguuguucuuaga

SEQ ID NO: 252 - RNA, 19 nt, Artificial Sequence
  synthetic construct
uuguuguuguucuuagaca

SEQ ID NO: 253 - RNA, 19 nt, Artificial Sequence
  synthetic construct
uguuguuguucuuagacaa

SEQ ID NO: 254 - RNA, 19 nt, Artificial Sequence
  synthetic construct
cuuuuuaaccuugcugaca

SEQ ID NO: 255 - RNA, 19 nt, Artificial Sequence
  synthetic construct
uuaaccuugcugacaucca

SEQ ID NO: 256 - RNA, 19 nt, Artificial Sequence
  synthetic construct
uugcugacauccaaauaga

SEQ ID NO: 257 - RNA, 19 nt, Artificial Sequence
  synthetic construct
agguuucuuuuuaaauuaa

SEQ ID NO: 258 - RNA, 19 nt, Artificial Sequence
  synthetic construct
aaauuaagaaauaauaaca

SEQ ID NO: 259 - RNA, 19 nt, Artificial Sequence
  synthetic construct
aauuaagaaauaauaacaa

SEQ ID NO: 260 - RNA, 19 nt, Artificial Sequence
  synthetic construct
auuaagaaauaauaacaau

SEQ ID NO: 261 - RNA, 19 nt, Artificial Sequence
  synthetic construct
uaagaaauaauaacaauua

SEQ ID NO: 262 - RNA, 19 nt, Artificial Sequence
  synthetic construct
aagaaauaauaacaauuaa

SEQ ID NO: 263 - RNA, 19 nt, Artificial Sequence
  synthetic construct
agaaauaauaacaauuaaa

SEQ ID NO: 264 - RNA, 19 nt, Artificial Sequence
  synthetic construct
acuaaaaguacaaaaaauu

SEQ ID NO: 265 - RNA, 19 nt, Artificial Sequence
  synthetic construct
cuaaaaguacaaaaaauua

SEQ ID NO: 266 - RNA, 19 nt, Artificial Sequence
  synthetic construct
agacuuauuuuccuuugua

SEQ ID NO: 267 - RNA, 19 nt, Artificial Sequence
  synthetic construct
auuuuccuuuguaauguau

SEQ ID NO: 268 - RNA, 19 nt, Artificial Sequence
  synthetic construct
aguuacagguuggacauga

SEQ ID NO: 269 - RNA, 19 nt, Artificial Sequence
  synthetic construct
uguggaauucuguuuguua

SEQ ID NO: 270 - RNA, 19 nt, Artificial Sequence
  synthetic construct
ggaauucuguuuguuaaau

SEQ ID NO: 271 - RNA, 19 nt, Artificial Sequence
  synthetic construct
auucuguuuguuaaaucaa

SEQ ID NO: 272 - RNA, 19 nt, Artificial Sequence
  synthetic construct
uguuuguuaaaucaaauua

SEQ ID NO: 273 - RNA, 19 nt, Artificial Sequence
  synthetic construct
acauaauaagcuuaacuga

SEQ ID NO: 274 - RNA, 19 nt, Artificial Sequence
  synthetic construct
acugauaaacagaauauuu

SEQ ID NO: 275 - RNA, 19 nt, Artificial Sequence
  synthetic construct
cugauaaacagaauauuua

SEQ ID NO: 276 - RNA, 19 nt, Artificial Sequence
  synthetic construct
uaguguaaaaauuuauauu

SEQ ID NO: 277 - RNA, 19 nt, Artificial Sequence
  synthetic construct
guguaaaaauuuauauuau

SEQ ID NO: 278 - RNA, 19 nt, Artificial Sequence
  synthetic construct
uaaaaauuuauauuauugu

SEQ ID NO: 279 - RNA, 19 nt, Artificial Sequence
  synthetic construct
aaaaauuuauauuauugug

SEQ ID NO: 280 - RNA, 19 nt, Artificial Sequence
  synthetic construct
uuuaacuuccagaaauaaa

SEQ ID NO: 281 - RNA, 19 nt, Artificial Sequence
  synthetic construct
auuaugaaacaccaaagug

SEQ ID NO: 282 - RNA, 19 nt, Artificial Sequence
  synthetic construct
agauuaugaaacaccaaag

SEQ ID NO: 283 - RNA, 19 nt, Artificial Sequence
  synthetic construct
aacauucgacucuugcagg

SEQ ID NO: 284 - RNA, 19 nt, Artificial Sequence
  synthetic construct
gaacauucgacucuugcag

SEQ ID NO: 285 - RNA, 19 nt, Artificial Sequence
  synthetic construct
agaacauucgacucuugca

SEQ ID NO: 286 - RNA, 19 nt, Artificial Sequence
  synthetic construct
uagagaacauucgacucuu

SEQ ID NO: 287 - RNA, 19 nt, Artificial Sequence
  synthetic construct
auagagaacauucgacucu

SEQ ID NO: 288 - RNA, 19 nt, Artificial Sequence
  synthetic construct
ugauagagaacauucgacu

SEQ ID NO: 289 - RNA, 19 nt, Artificial Sequence
  synthetic construct
cugauagagaacauucgac

SEQ ID NO: 290 - RNA, 19 nt, Artificial Sequence
  synthetic construct
aaacugcuugauucuucgu

SEQ ID NO: 291 - RNA, 19 nt, Artificial Sequence
  synthetic construct
gaaacugcuugauucuucg

SEQ ID NO: 292 - RNA, 19 nt, Artificial Sequence
  synthetic construct
agaaacugcuugauucuuc

SEQ ID NO: 293 - RNA, 19 nt, Artificial Sequence
  synthetic construct
uccauuggcuucucaagau

SEQ ID NO: 294 - RNA, 19 nt, Artificial Sequence
  synthetic construct
auuuucuguucuagauccu

SEQ ID NO: 295 - RNA, 19 nt, Artificial Sequence
  synthetic construct
uucauuuucuguucuagau

SEQ ID NO: 296 - RNA, 19 nt, Artificial Sequence
  synthetic construct
gaaaucaaagucauccugg

SEQ ID NO: 297 - RNA, 19 nt, Artificial Sequence
  synthetic construct
ugaaaucaaagucauccug

SEQ ID NO: 298 - RNA, 19 nt, Artificial Sequence
  synthetic construct
uugaaaucaaagucauccu

SEQ ID NO: 299 - RNA, 19 nt, Artificial Sequence
  synthetic construct
uaguugaaaucaaagucau

SEQ ID NO: 300 - RNA, 19 nt, Artificial Sequence
  synthetic construct
auaguugaaaucaaaguca

SEQ ID NO: 301 - RNA, 19 nt, Artificial Sequence
  synthetic construct
uauaguugaaaucaaaguc

SEQ ID NO: 302 - RNA, 19 nt, Artificial Sequence
  synthetic construct
uuauaguugaaaucaaagu

SEQ ID NO: 303 - RNA, 19 nt, Artificial Sequence
  synthetic construct
uuuauaguugaaaucaaag

SEQ ID NO: 304 - RNA, 19 nt, Artificial Sequence
  synthetic construct
uuguuuccauucagaucuu

SEQ ID NO: 305 - RNA, 19 nt, Artificial Sequence
  synthetic construct
ugguuguuuccauucagau

SEQ ID NO: 306 - RNA, 19 nt, Artificial Sequence
  synthetic construct
acugguuguuuccauucag

SEQ ID NO: 307 - RNA, 19 nt, Artificial Sequence
  synthetic construct
ugacguuauccaguuuucu

SEQ ID NO: 308 - RNA, 19 nt, Artificial Sequence
  synthetic construct
augacguuauccaguuuuc

SEQ ID NO: 309 - RNA, 19 nt, Artificial Sequence
  synthetic construct
uaaugacguuauccaguuu

SEQ ID NO: 310 - RNA, 19 nt, Artificial Sequence
  synthetic construct
ugcuaaugacguuauccag

SEQ ID NO: 311 - RNA, 19 nt, Artificial Sequence
  synthetic construct
ucugcuaaugacguuaucc

SEQ ID NO: 312 - RNA, 19 nt, Artificial Sequence
  synthetic construct
uucugcuaaugacguuauc

SEQ ID NO: 313 - RNA, 19 nt, Artificial Sequence
  synthetic construct
auucugcuaaugacguuau

SEQ ID NO: 314 - RNA, 19 nt, Artificial Sequence
  synthetic construct
uccaguuucuuaauuuguu

SEQ ID NO: 315 - RNA, 19 nt, Artificial Sequence
  synthetic construct
aaacuuuuugcugcaacuc

SEQ ID NO: 316 - RNA, 19 nt, Artificial Sequence
  synthetic construct
gaaacuuuuugcugcaacu

SEQ ID NO: 317 - RNA, 19 nt, Artificial Sequence
  synthetic construct
ucauuaaguuucuaaacag

SEQ ID NO: 318 - RNA, 19 nt, Artificial Sequence
  synthetic construct
cacuuuucauuaaguuucu

SEQ ID NO: 319 - RNA, 19 nt, Artificial Sequence
  synthetic construct
ugacuuuaguagugaacug

SEQ ID NO: 320 - RNA, 19 nt, Artificial Sequence
  synthetic construct
ucaacucagggaauuugac

SEQ ID NO: 321 - RNA, 19 nt, Artificial Sequence
  synthetic construct
uaauucaacucagggaauu

SEQ ID NO: 322 - RNA, 19 nt, Artificial Sequence
  synthetic construct
auaauucaacucagggaau

SEQ ID NO: 323 - RNA, 19 nt, Artificial Sequence
  synthetic construct
ugauaauucaacucaggga

SEQ ID NO: 324 - RNA, 19 nt, Artificial Sequence
  synthetic construct
gcugauaauucaacucagg

SEQ ID NO: 325 - RNA, 19 nt, Artificial Sequence
  synthetic construct
agcugauaauucaacucag

SEQ ID NO: 326 - RNA, 19 nt, Artificial Sequence
  synthetic construct
aagcugauaauucaacuca

SEQ ID NO: 327 - RNA, 19 nt, Artificial Sequence
  synthetic construct
uaagcugauaauucaacuc

SEQ ID NO: 328 - RNA, 19 nt, Artificial Sequence
  synthetic construct
uuaagcugauaauucaacu

SEQ ID NO: 329 - RNA, 19 nt, Artificial Sequence
  synthetic construct
uuuaagcugauaauucaac

SEQ ID NO: 330 - RNA, 19 nt, Artificial Sequence
  synthetic construct
uuuuaagcugauaauucaa

SEQ ID NO: 331 - RNA, 19 nt, Artificial Sequence
  synthetic construct
auuuuaagcugauaauuca

SEQ ID NO: 332 - RNA, 19 nt, Artificial Sequence
  synthetic construct
uaauuuuaagcugauaauu

SEQ ID NO: 333 - RNA, 19 nt, Artificial Sequence
  synthetic construct
uuaauuuuaagcugauaau

SEQ ID NO: 334 - RNA, 19 nt, Artificial Sequence
  synthetic construct
acacuuuaauuuuaagcug

SEQ ID NO: 335 - RNA, 19 nt, Artificial Sequence
  synthetic construct
cacacuuuaauuuuaagcu

SEQ ID NO: 336 - RNA, 19 nt, Artificial Sequence
  synthetic construct
ucaaugcacacuuuaauuu

SEQ ID NO: 337 - RNA, 19 nt, Artificial Sequence
  synthetic construct
ucuuugucaaugcacacuu

SEQ ID NO: 338 - RNA, 19 nt, Artificial Sequence
  synthetic construct
uccauguucaucacuuuug

SEQ ID NO: 339 - RNA, 19 nt, Artificial Sequence
  synthetic construct
auucuuccauguucaucac

SEQ ID NO: 340 - RNA, 19 nt, Artificial Sequence
  synthetic construct
ucaaguguuugaauucugc

SEQ ID NO: 341 - RNA, 19 nt, Artificial Sequence
  synthetic construct
aucagggaagcaucacaau

SEQ ID NO: 342 - RNA, 19 nt, Artificial Sequence
  synthetic construct
aucaccacaacuggcaagg

SEQ ID NO: 343 - RNA, 19 nt, Artificial Sequence
  synthetic construct
agaucaccacaacuggcaa

SEQ ID NO: 344 - RNA, 19 nt, Artificial Sequence
  synthetic construct
aaaaguuuacauucuuggg

SEQ ID NO: 345 - RNA, 19 nt, Artificial Sequence
  synthetic construct
aaaaaguuuacauucuugg

SEQ ID NO: 346 - RNA, 19 nt, Artificial Sequence
  synthetic construct
aaaaaaguuuacauucuug

SEQ ID NO: 347 - RNA, 19 nt, Artificial Sequence
  synthetic construct
uaaaaaaguuuacauucuu

SEQ ID NO: 348 - RNA, 19 nt, Artificial Sequence
  synthetic construct
guaaaaaaguuuacauucu

SEQ ID NO: 349 - RNA, 19 nt, Artificial Sequence
  synthetic construct
ugguaaaaaaguuuacauu

SEQ ID NO: 350 - RNA, 19 nt, Artificial Sequence
  synthetic construct
ugaauaauucacaccaggu

SEQ ID NO: 351 - RNA, 19 nt, Artificial Sequence
  synthetic construct
ccugaauaauucacaccag

SEQ ID NO: 352 - RNA, 19 nt, Artificial Sequence
  synthetic construct
acccugaauaauucacacc

SEQ ID NO: 353 - RNA, 19 nt, Artificial Sequence
  synthetic construct
acacccugaauaauucaca

SEQ ID NO: 354 - RNA, 19 nt, Artificial Sequence
  synthetic construct
ggucaaugauauuguccag

SEQ ID NO: 355 - RNA, 19 nt, Artificial Sequence
  synthetic construct
aaggucaaugauauugucc

SEQ ID NO: 356 - RNA, 19 nt, Artificial Sequence
  synthetic construct
caaggucaaugauauuguc

SEQ ID NO: 357 - RNA, 19 nt, Artificial Sequence
  synthetic construct
acaaggucaaugauauugu

SEQ ID NO: 358 - RNA, 19 nt, Artificial Sequence
  synthetic construct
cacaaggucaaugauauug

SEQ ID NO: 359 - RNA, 19 nt, Artificial Sequence
  synthetic construct
ucacaaggucaaugauauu

SEQ ID NO: 360 - RNA, 19 nt, Artificial Sequence
  synthetic construct
uucacaaggucaaugauau

SEQ ID NO: 361 - RNA, 19 nt, Artificial Sequence
  synthetic construct
uuucacaaggucaaugaua

SEQ ID NO: 362 - RNA, 19 nt, Artificial Sequence
  synthetic construct
uuuucacaaggucaaugau

SEQ ID NO: 363 - RNA, 19 nt, Artificial Sequence
  synthetic construct
uuuuucacaaggucaauga

SEQ ID NO: 364 - RNA, 19 nt, Artificial Sequence
  synthetic construct
acuuuuucacaaggucaau

SEQ ID NO: 365 - RNA, 19 nt, Artificial Sequence
  synthetic construct
uacuuuuucacaaggucaa

SEQ ID NO: 366 - RNA, 19 nt, Artificial Sequence
  synthetic construct
uguacuuuuucacaagguc

SEQ ID NO: 367 - RNA, 19 nt, Artificial Sequence
  synthetic construct
auguacuuuuucacaaggu

SEQ ID NO: 368 - RNA, 19 nt, Artificial Sequence
  synthetic construct
ugaaucuuagcaggaaggu

SEQ ID NO: 369 - RNA, 19 nt, Artificial Sequence
  synthetic construct
uguuguucagcugcugcuu

SEQ ID NO: 370 - RNA, 19 nt, Artificial Sequence
  synthetic construct
auguuguucagcugcugcu

SEQ ID NO: 371 - RNA, 19 nt, Artificial Sequence
  synthetic construct
acauguuguucagcugcug

SEQ ID NO: 372 - RNA, 19 nt, Artificial Sequence
  synthetic construct
gacauguuguucagcugcu

SEQ ID NO: 373 - RNA, 19 nt, Artificial Sequence
  synthetic construct
aaaugacauguuguucagc

SEQ ID NO: 374 - RNA, 19 nt, Artificial Sequence
  synthetic construct
caaaugacauguuguucag

SEQ ID NO: 375 - RNA, 19 nt, Artificial Sequence
  synthetic construct
gcaaaugacauguuguuca

SEQ ID NO: 376 - RNA, 19 nt, Artificial Sequence
  synthetic construct
agcaaaugacauguuguuc

SEQ ID NO: 377 - RNA, 19 nt, Artificial Sequence
  synthetic construct
cagcaaaugacauguuguu

SEQ ID NO: 378 - RNA, 19 nt, Artificial Sequence
  synthetic construct
ucagcaaaugacauguugu

SEQ ID NO: 379 - RNA, 19 nt, Artificial Sequence
  synthetic construct
auuucagcaaaugacaugu

SEQ ID NO: 380 - RNA, 19 nt, Artificial Sequence
  synthetic construct
ugauuucagcaaaugacau

SEQ ID NO: 381 - RNA, 19 nt, Artificial Sequence
  synthetic construct
augauuucagcaaaugaca

SEQ ID NO: 382 - RNA, 19 nt, Artificial Sequence
  synthetic construct
ccaugaugauuucagcaaa

SEQ ID NO: 383 - RNA, 19 nt, Artificial Sequence
  synthetic construct
aacuuggucuucagguaug

SEQ ID NO: 384 - RNA, 19 nt, Artificial Sequence
  synthetic construct
auaaacuuggucuucaggu

SEQ ID NO: 385 - RNA, 19 nt, Artificial Sequence
  synthetic construct
agauaaacuuggucuucag

SEQ ID NO: 386 - RNA, 19 nt, Artificial Sequence
  synthetic construct
acagauaaacuuggucuuc

SEQ ID NO: 387 - RNA, 19 nt, Artificial Sequence
  synthetic construct
ucacacagauaaacuuggu

SEQ ID NO: 388 - RNA, 19 nt, Artificial Sequence
  synthetic construct
ugucacacagauaaacuug

SEQ ID NO: 389 - RNA, 19 nt, Artificial Sequence
  synthetic construct
aaacugcaucaaugaaucu

SEQ ID NO: 390 - RNA, 19 nt, Artificial Sequence
  synthetic construct
caaacugcaucaaugaauc

SEQ ID NO: 391 - RNA, 19 nt, Artificial Sequence
  synthetic construct
uccaaacugcaucaaugaa

SEQ ID NO: 392 - RNA, 19 nt, Artificial Sequence
  synthetic construct
uuccaaacugcaucaauga

SEQ ID NO: 393 - RNA, 19 nt, Artificial Sequence
  synthetic construct
uauuuccaaacugcaucaa

SEQ ID NO: 394 - RNA, 19 nt, Artificial Sequence
  synthetic construct
uuauuuccaaacugcauca

SEQ ID NO: 395 - RNA, 19 nt, Artificial Sequence
  synthetic construct
auuauuuccaaacugcauc

SEQ ID NO: 396 - RNA, 19 nt, Artificial Sequence
  synthetic construct
accauuauuuccaaacugc

SEQ ID NO: 397 - RNA, 19 nt, Artificial Sequence
  synthetic construct
ucaccauuauuuccaaacu

SEQ ID NO: 398 - RNA, 19 nt, Artificial Sequence
  synthetic construct
accuucaccauuauuucca

SEQ ID NO: 399 - RNA, 19 nt, Artificial Sequence
  synthetic construct
ucagcaccuucaccauuau

SEQ ID NO: 400 - RNA, 19 nt, Artificial Sequence
  synthetic construct
acaaaguuaguaguuucag

SEQ ID NO: 401 - RNA, 19 nt, Artificial Sequence
  synthetic construct
accacaaaguuaguaguuu

SEQ ID NO: 402 - RNA, 19 nt, Artificial Sequence
  synthetic construct
aaccacaaaguuaguaguu

SEQ ID NO: 403 - RNA, 19 nt, Artificial Sequence
  synthetic construct
gaaccacaaaguuaguagu

SEQ ID NO: 404 - RNA, 19 nt, Artificial Sequence
  synthetic construct
aucuggaaccacaaaguua

SEQ ID NO: 405 - RNA, 19 nt, Artificial Sequence
  synthetic construct
aaaaucuggaaccacaaag

SEQ ID NO: 406 - RNA, 19 nt, Artificial Sequence
  synthetic construct
aaaaaucuggaaccacaaa

SEQ ID NO: 407 - RNA, 19 nt, Artificial Sequence
  synthetic construct
aaaaaaucuggaaccacaa

SEQ ID NO: 408 - RNA, 19 nt, Artificial Sequence
  synthetic construct
uucacucauuucucuauuu

SEQ ID NO: 409 - RNA, 19 nt, Artificial Sequence
  synthetic construct
auucacucauuucucuauu

SEQ ID NO: 410 - RNA, 19 nt, Artificial Sequence
  synthetic construct
uagauaaaagcagaucacc

SEQ ID NO: 411 - RNA, 19 nt, Artificial Sequence
  synthetic construct
cauuuagauaaaagcagau

SEQ ID NO: 412 - RNA, 19 nt, Artificial Sequence
  synthetic construct
ugcauuuagauaaaagcag

SEQ ID NO: 413 - RNA, 19 nt, Artificial Sequence
  synthetic construct
aacacauccuuauuugcau

SEQ ID NO: 414 - RNA, 19 nt, Artificial Sequence
  synthetic construct
ucagagaacacauccuuau

SEQ ID NO: 415 - RNA, 19 nt, Artificial Sequence
  synthetic construct
acaagacauuuccuuuuuc

SEQ ID NO: 416 - RNA, 19 nt, Artificial Sequence
  synthetic construct
acacaagacauuuccuuuu

SEQ ID NO: 417 - RNA, 19 nt, Artificial Sequence
  synthetic construct
aacacaagacauuuccuuu

SEQ ID NO: 418 - RNA, 19 nt, Artificial Sequence
  synthetic construct
acaacacaagacauuuccu

SEQ ID NO: 419 - RNA, 19 nt, Artificial Sequence
  synthetic construct
aacaacacaagacauuucc

SEQ ID NO: 420 - RNA, 19 nt, Artificial Sequence
  synthetic construct
aaacaacacaagacauuuc

SEQ ID NO: 421 - RNA, 19 nt, Artificial Sequence
  synthetic construct
aaaacaacacaagacauuu

SEQ ID NO: 422 - RNA, 19 nt, Artificial Sequence
  synthetic construct
caaaacaacacaagacauu

SEQ ID NO: 423 - RNA, 19 nt, Artificial Sequence
  synthetic construct
acaaaacaacacaagacau

SEQ ID NO: 424 - RNA, 19 nt, Artificial Sequence
  synthetic construct
aacaaaacaacacaagaca

SEQ ID NO: 425 - RNA, 19 nt, Artificial Sequence
  synthetic construct
gaacaaaacaacacaagac

SEQ ID NO: 426 - RNA, 19 nt, Artificial Sequence
  synthetic construct
auaacaaaaagcugcugag

SEQ ID NO: 427 - RNA, 19 nt, Artificial Sequence
  synthetic construct
caauaacaaaaagcugcug

SEQ ID NO: 428 - RNA, 19 nt, Artificial Sequence
  synthetic construct
acaauaacaaaaagcugcu

SEQ ID NO: 429 - RNA, 19 nt, Artificial Sequence
  synthetic construct
aacaauaacaaaaagcugc

SEQ ID NO: 430 - RNA, 19 nt, Artificial Sequence
  synthetic construct
caacaauaacaaaaagcug

SEQ ID NO: 431 - RNA, 19 nt, Artificial Sequence
  synthetic construct
acaacaauaacaaaaagcu

SEQ ID NO: 432 - RNA, 19 nt, Artificial Sequence
  synthetic construct
aacaacaauaacaaaaagc

SEQ ID NO: 433 - RNA, 19 nt, Artificial Sequence
  synthetic construct
caacaacaauaacaaaaag

SEQ ID NO: 434 - RNA, 19 nt, Artificial Sequence
  synthetic construct
acaacaacaauaacaaaaa

SEQ ID NO: 435 - RNA, 19 nt, Artificial Sequence
  synthetic construct
aacaacaacaauaacaaaa

SEQ ID NO: 436 - RNA, 19 nt, Artificial Sequence
  synthetic construct
caacaacaacaauaacaaa

SEQ ID NO: 437 - RNA, 19 nt, Artificial Sequence
  synthetic construct
acaacaacaacaauaacaa

SEQ ID NO: 438 - RNA, 19 nt, Artificial Sequence
  synthetic construct
aacaacaacaacaauaaca

SEQ ID NO: 439 - RNA, 19 nt, Artificial Sequence
  synthetic construct
gaacaacaacaacaauaac

SEQ ID NO: 440 - RNA, 19 nt, Artificial Sequence
  synthetic construct
agaacaacaacaacaauaa

SEQ ID NO: 441 - RNA, 19 nt, Artificial Sequence
  synthetic construct
aagaacaacaacaacaaua

SEQ ID NO: 442 - RNA, 19 nt, Artificial Sequence
  synthetic construct
uaagaacaacaacaacaau

SEQ ID NO: 443 - RNA, 19 nt, Artificial Sequence
  synthetic construct
ucuaagaacaacaacaaca

SEQ ID NO: 444 - RNA, 19 nt, Artificial Sequence
  synthetic construct
ugucuaagaacaacaacaa

SEQ ID NO: 445 - RNA, 19 nt, Artificial Sequence
  synthetic construct
uugucuaagaacaacaaca

SEQ ID NO: 446 - RNA, 19 nt, Artificial Sequence
  synthetic construct
ugucagcaagguuaaaaag

SEQ ID NO: 447 - RNA, 19 nt, Artificial Sequence
  synthetic construct
uggaugucagcaagguuaa

SEQ ID NO: 448 - RNA, 19 nt, Artificial Sequence
  synthetic construct
ucuauuuggaugucagcaa

SEQ ID NO: 449 - RNA, 19 nt, Artificial Sequence
  synthetic construct
uuaauuuaaaaagaaaccu

SEQ ID NO: 450 - RNA, 19 nt, Artificial Sequence
  synthetic construct
uguuauuauuucuuaauuu

SEQ ID NO: 451 - RNA, 19 nt, Artificial Sequence
  synthetic construct
uuguuauuauuucuuaauu

SEQ ID NO: 452 - RNA, 19 nt, Artificial Sequence
  synthetic construct
auuguuauuauuucuuaau

SEQ ID NO: 453 - RNA, 19 nt, Artificial Sequence
  synthetic construct
uaauuguuauuauuucuua

SEQ ID NO: 454 - RNA, 19 nt, Artificial Sequence
  synthetic construct
uuaauuguuauuauuucuu

SEQ ID NO: 455 - RNA, 19 nt, Artificial Sequence
  synthetic construct
uuuaauuguuauuauuucu

SEQ ID NO: 456 - RNA, 19 nt, Artificial Sequence
  synthetic construct
aauuuuuuguacuuuuagu

SEQ ID NO: 457 - RNA, 19 nt, Artificial Sequence
  synthetic construct
uaauuuuuuguacuuuuag

SEQ ID NO: 458 - RNA, 19 nt, Artificial Sequence
  synthetic construct
uacaaaggaaaauaagucu

SEQ ID NO: 459 - RNA, 19 nt, Artificial Sequence
  synthetic construct
auacauuacaaaggaaaau

SEQ ID NO: 460 - RNA, 19 nt, Artificial Sequence
  synthetic construct
ucauguccaaccuguaacu

SEQ ID NO: 461 - RNA, 19 nt, Artificial Sequence
  synthetic construct
uaacaaacagaauuccaca

SEQ ID NO: 462 - RNA, 19 nt, Artificial Sequence
  synthetic construct
auuuaacaaacagaauucc

SEQ ID NO: 463 - RNA, 19 nt, Artificial Sequence
  synthetic construct
uugauuuaacaaacagaau

SEQ ID NO: 464 - RNA, 19 nt, Artificial Sequence
  synthetic construct
uaauuugauuuaacaaaca

SEQ ID NO: 465 - RNA, 19 nt, Artificial Sequence
  synthetic construct
ucaguuaagcuuauuaugu

SEQ ID NO: 466 - RNA, 19 nt, Artificial Sequence
  synthetic construct
aaauauucuguuuaucagu

SEQ ID NO: 467 - RNA, 19 nt, Artificial Sequence
  synthetic construct
uaaauauucuguuuaucag

SEQ ID NO: 468 - RNA, 19 nt, Artificial Sequence
  synthetic construct
aauauaaauuuuuacacua

SEQ ID NO: 469 - RNA, 19 nt, Artificial Sequence
  synthetic construct
auaauauaaauuuuuacac

SEQ ID NO: 470 - RNA, 19 nt, Artificial Sequence
  synthetic construct
acaauaauauaaauuuuua

SEQ ID NO: 471 - RNA, 19 nt, Artificial Sequence
  synthetic construct
cacaauaauauaaauuuuu

SEQ ID NO: 472 - RNA, 19 nt, Artificial Sequence
  synthetic construct
uuuauuucuggaaguuaaa

SEQ ID NO: 473 - RNA, 25 nt, Artificial Sequence
  synthetic construct
cacuuugguguuucauaauagcagc

SEQ ID NO: 474 - RNA, 25 nt, Artificial Sequence
  synthetic construct
cuuugguguuucauaaucuagcagc

SEQ ID NO: 475 - RNA, 25 nt, Artificial Sequence
  synthetic construct
ccugcaagagucgaauguuagcagc

SEQ ID NO: 476 - RNA, 25 nt, Artificial Sequence
  synthetic construct
cugcaagagucgaauguucagcagc

SEQ ID NO: 477 - RNA, 25 nt, Artificial Sequence
  synthetic construct
ugcaagagucgaauguucuagcagc

SEQ ID NO: 478 - RNA, 25 nt, Artificial Sequence
  synthetic construct
aagagucgaauguucucuaagcagc

SEQ ID NO: 479 - RNA, 25 nt, Artificial Sequence
  synthetic construct
agagucgaauguucucuauagcagc

SEQ ID NO: 480 - RNA, 25 nt, Artificial Sequence
  synthetic construct
agucgaauguucucuaucaagcagc

SEQ ID NO: 481 - RNA, 25 nt, Artificial Sequence
  synthetic construct
gucgaauguucucuaucagagcagc

SEQ ID NO: 482 - RNA, 25 nt, Artificial Sequence
  synthetic construct
acgaagaaucaagcaguuuagcagc

SEQ ID NO: 483 - RNA, 25 nt, Artificial Sequence
  synthetic construct
cgaagaaucaagcaguuucagcagc

SEQ ID NO: 484 - RNA, 25 nt, Artificial Sequence
  synthetic construct
gaagaaucaagcaguuucuagcagc

SEQ ID NO: 485 - RNA, 25 nt, Artificial Sequence
  synthetic construct
aucuugagaagccaauggaagcagc

SEQ ID NO: 486 - RNA, 25 nt, Artificial Sequence
  synthetic construct
aggaucuagaacagaaaauagcagc

SEQ ID NO: 487 - RNA, 25 nt, Artificial Sequence
  synthetic construct
aucuagaacagaaaaugaaagcagc

SEQ ID NO: 488 - RNA, 25 nt, Artificial Sequence
  synthetic construct
ccaggaugacuuugauuucagcagc

SEQ ID NO: 489 - RNA, 25 nt, Artificial Sequence
  synthetic construct
caggaugacuuugauuucaagcagc

SEQ ID NO: 490 - RNA, 25 nt, Artificial Sequence
  synthetic construct
aggaugacuuugauuucaaagcagc

SEQ ID NO: 491 - RNA, 25 nt, Artificial Sequence
  synthetic construct
augacuuugauuucaacuaagcagc

SEQ ID NO: 492 - RNA, 25 nt, Artificial Sequence
  synthetic construct
ugacuuugauuucaacuauagcagc

SEQ ID NO: 493 - RNA, 25 nt, Artificial Sequence
  synthetic construct
gacuuugauuucaacuauaagcagc

SEQ ID NO: 494 - RNA, 25 nt, Artificial Sequence
  synthetic construct
acuuugauuucaacuauaaagcagc

SEQ ID NO: 495 - RNA, 25 nt, Artificial Sequence
  synthetic construct
cuuugauuucaacuauaaaagcagc

SEQ ID NO: 496 - RNA, 25 nt, Artificial Sequence
  synthetic construct
aagaucugaauggaaacaaagcagc

SEQ ID NO: 497 - RNA, 25 nt, Artificial Sequence
  synthetic construct
aucugaauggaaacaaccaagcagc

SEQ ID NO: 498 - RNA, 25 nt, Artificial Sequence
  synthetic construct
cugaauggaaacaaccaguagcagc

SEQ ID NO: 499 - RNA, 25 nt, Artificial Sequence
  synthetic construct
agaaaacuggauaacgucaagcagc

SEQ ID NO: 500 - RNA, 25 nt, Artificial Sequence
  synthetic construct
gaaaacuggauaacgucauagcagc

SEQ ID NO: 501 - RNA, 25 nt, Artificial Sequence
  synthetic construct
aaacuggauaacgucauuaagcagc

SEQ ID NO: 502 - RNA, 25 nt, Artificial Sequence
  synthetic construct
cuggauaacgucauuagcaagcagc

SEQ ID NO: 503 - RNA, 25 nt, Artificial Sequence
  synthetic construct
ggauaacgucauuagcagaagcagc

SEQ ID NO: 504 - RNA, 25 nt, Artificial Sequence
  synthetic construct
gauaacgucauuagcagaaagcagc

SEQ ID NO: 505 - RNA, 25 nt, Artificial Sequence
  synthetic construct
auaacgucauuagcagaauagcagc

SEQ ID NO: 506 - RNA, 25 nt, Artificial Sequence
  synthetic construct
aacaaauuaagaaacuggaagcagc

SEQ ID NO: 507 - RNA, 25 nt, Artificial Sequence
  synthetic construct
gaguugcagcaaaaaguuuagcagc

SEQ ID NO: 508 - RNA, 25 nt, Artificial Sequence
  synthetic construct
aguugcagcaaaaaguuucagcagc

SEQ ID NO: 509 - RNA, 25 nt, Artificial Sequence
  synthetic construct
cuguuuagaaacuuaaugaagcagc

SEQ ID NO: 510 - RNA, 25 nt, Artificial Sequence
  synthetic construct
agaaacuuaaugaaaagugagcagc

SEQ ID NO: 511 - RNA, 25 nt, Artificial Sequence
  synthetic construct
caguucacuacuaaagucaagcagc

SEQ ID NO: 512 - RNA, 25 nt, Artificial Sequence
  synthetic construct
gucaaauucccugaguugaagcagc

SEQ ID NO: 513 - RNA, 25 nt, Artificial Sequence
  synthetic construct
aauucccugaguugaauuaagcagc

SEQ ID NO: 514 - RNA, 25 nt, Artificial Sequence
  synthetic construct
auucccugaguugaauuauagcagc

SEQ ID NO: 515 - RNA, 25 nt, Artificial Sequence
  synthetic construct
ucccugaguugaauuaucaagcagc

SEQ ID NO: 516 - RNA, 25 nt, Artificial Sequence
  synthetic construct
ccugaguugaauuaucagcagcagc

SEQ ID NO: 517 - RNA, 25 nt, Artificial Sequence
  synthetic construct
cugaguugaauuaucagcuagcagc

SEQ ID NO: 518 - RNA, 25 nt, Artificial Sequence
  synthetic construct
ugaguugaauuaucagcuuagcagc

SEQ ID NO: 519 - RNA, 25 nt, Artificial Sequence
  synthetic construct
gaguugaauuaucagcuuaagcagc

SEQ ID NO: 520 - RNA, 25 nt, Artificial Sequence
  synthetic construct
aguugaauuaucagcuuaaagcagc

SEQ ID NO: 521 - RNA, 25 nt, Artificial Sequence
  synthetic construct
guugaauuaucagcuuaaaagcagc

SEQ ID NO: 522 - RNA, 25 nt, Artificial Sequence
  synthetic construct
uugaauuaucagcuuaaaaagcagc

SEQ ID NO: 523 - RNA, 25 nt, Artificial Sequence
  synthetic construct
ugaauuaucagcuuaaaauagcagc

SEQ ID NO: 524 - RNA, 25 nt, Artificial Sequence
  synthetic construct
aauuaucagcuuaaaauuaagcagc

SEQ ID NO: 525 - RNA, 25 nt, Artificial Sequence
  synthetic construct
auuaucagcuuaaaauuaaagcagc

SEQ ID NO: 526 - RNA, 25 nt, Artificial Sequence
  synthetic construct
cagcuuaaaauuaaaguguagcagc

SEQ ID NO: 527 - RNA, 25 nt, Artificial Sequence
  synthetic construct
agcuuaaaauuaaagugugagcagc

SEQ ID NO: 528 - RNA, 25 nt, Artificial Sequence
  synthetic construct
aaauuaaagugugcauugaagcagc

SEQ ID NO: 529 - RNA, 25 nt, Artificial Sequence
  synthetic construct
aagugugcauugacaaagaagcagc

SEQ ID NO: 530 - RNA, 25 nt, Artificial Sequence
  synthetic construct
caaaagugaugaacauggaagcagc

SEQ ID NO: 531 - RNA, 25 nt, Artificial Sequence
  synthetic construct
gugaugaacauggaagaauagcagc

SEQ ID NO: 532 - RNA, 25 nt, Artificial Sequence
  synthetic construct
gcagaauucaaacacuugaagcagc

SEQ ID NO: 533 - RNA, 25 nt, Artificial Sequence
  synthetic construct
auugugaugcuucccugauagcagc

SEQ ID NO: 534 - RNA, 25 nt, Artificial Sequence
  synthetic construct
ccuugccaguuguggugauagcagc

SEQ ID NO: 535 - RNA, 25 nt, Artificial Sequence
  synthetic construct
uugccaguuguggugaucuagcagc

SEQ ID NO: 536 - RNA, 25 nt, Artificial Sequence
  synthetic construct
cccaagaauguaaacuuuuagcagc

SEQ ID NO: 537 - RNA, 25 nt, Artificial Sequence
  synthetic construct
ccaagaauguaaacuuuuuagcagc

SEQ ID NO: 538 - RNA, 25 nt, Artificial Sequence
  synthetic construct
caagaauguaaacuuuuuuagcagc

SEQ ID NO: 539 - RNA, 25 nt, Artificial Sequence
  synthetic construct
aagaauguaaacuuuuuuaagcagc

SEQ ID NO: 540 - RNA, 25 nt, Artificial Sequence
  synthetic construct
agaauguaaacuuuuuuacagcagc

SEQ ID NO: 541 - RNA, 25 nt, Artificial Sequence
  synthetic construct
aauguaaacuuuuuuaccaagcagc

SEQ ID NO: 542 - RNA, 25 nt, Artificial Sequence
  synthetic construct
accuggugugaauuauucaagcagc

SEQ ID NO: 543 - RNA, 25 nt, Artificial Sequence
  synthetic construct
cuggugugaauuauucaggagcagc

SEQ ID NO: 544 - RNA, 25 nt, Artificial Sequence
  synthetic construct
ggugugaauuauucaggguagcagc

SEQ ID NO: 545 - RNA, 25 nt, Artificial Sequence
  synthetic construct
ugugaauuauucaggguguagcagc

SEQ ID NO: 546 - RNA, 25 nt, Artificial Sequence
  synthetic construct
cuggacaauaucauugaccagcagc

SEQ ID NO: 547 - RNA, 25 nt, Artificial Sequence
  synthetic construct
ggacaauaucauugaccuuagcagc

SEQ ID NO: 548 - RNA, 25 nt, Artificial Sequence
  synthetic construct
gacaauaucauugaccuugagcagc

SEQ ID NO: 549 - RNA, 25 nt, Artificial Sequence
  synthetic construct
acaauaucauugaccuuguagcagc

SEQ ID NO: 550 - RNA, 25 nt, Artificial Sequence
  synthetic construct
caauaucauugaccuugugagcagc

SEQ ID NO: 551 - RNA, 25 nt, Artificial Sequence
  synthetic construct
aauaucauugaccuugugaagcagc

SEQ ID NO: 552 - RNA, 25 nt, Artificial Sequence
  synthetic construct
auaucauugaccuugugaaagcagc

SEQ ID NO: 553 - RNA, 25 nt, Artificial Sequence
  synthetic construct
uaucauugaccuugugaaaagcagc

SEQ ID NO: 554 - RNA, 25 nt, Artificial Sequence
  synthetic construct
aucauugaccuugugaaaaagcagc

SEQ ID NO: 555 - RNA, 25 nt, Artificial Sequence
  synthetic construct
ucauugaccuugugaaaaaagcagc

SEQ ID NO: 556 - RNA, 25 nt, Artificial Sequence
  synthetic construct
auugaccuugugaaaaaguagcagc

SEQ ID NO: 557 - RNA, 25 nt, Artificial Sequence
  synthetic construct
uugaccuugugaaaaaguaagcagc

SEQ ID NO: 558 - RNA, 25 nt, Artificial Sequence
  synthetic construct
gaccuugugaaaaaguacaagcagc

SEQ ID NO: 559 - RNA, 25 nt, Artificial Sequence
  synthetic construct
accuugugaaaaaguacauagcagc

SEQ ID NO: 560 - RNA, 25 nt, Artificial Sequence
  synthetic construct
accuuccugcuaagauucaagcagc

SEQ ID NO: 561 - RNA, 25 nt, Artificial Sequence
  synthetic construct
aagcagcagcugaacaacaagcagc

SEQ ID NO: 562 - RNA, 25 nt, Artificial Sequence
  synthetic construct
agcagcagcugaacaacauagcagc

SEQ ID NO: 563 - RNA, 25 nt, Artificial Sequence
  synthetic construct
cagcagcugaacaacauguagcagc

SEQ ID NO: 564 - RNA, 25 nt, Artificial Sequence
  synthetic construct
agcagcugaacaacaugucagcagc

SEQ ID NO: 565 - RNA, 25 nt, Artificial Sequence
  synthetic construct
gcugaacaacaugucauuuagcagc

SEQ ID NO: 566 - RNA, 25 nt, Artificial Sequence
  synthetic construct
cugaacaacaugucauuugagcagc

SEQ ID NO: 567 - RNA, 25 nt, Artificial Sequence
  synthetic construct
ugaacaacaugucauuugcagcagc

SEQ ID NO: 568 - RNA, 25 nt, Artificial Sequence
  synthetic construct
gaacaacaugucauuugcuagcagc

SEQ ID NO: 569 - RNA, 25 nt, Artificial Sequence
  synthetic construct
aacaacaugucauuugcugagcagc

SEQ ID NO: 570 - RNA, 25 nt, Artificial Sequence
  synthetic construct
acaacaugucauuugcugaagcagc

SEQ ID NO: 571 - RNA, 25 nt, Artificial Sequence
  synthetic construct
acaugucauuugcugaaauagcagc

SEQ ID NO: 572 - RNA, 25 nt, Artificial Sequence
  synthetic construct
augucauuugcugaaaucaagcagc

SEQ ID NO: 573 - RNA, 25 nt, Artificial Sequence
  synthetic construct
ugucauuugcugaaaucauagcagc

SEQ ID NO: 574 - RNA, 25 nt, Artificial Sequence
  synthetic construct
uuugcugaaaucaucauggagcagc

SEQ ID NO: 575 - RNA, 25 nt, Artificial Sequence
  synthetic construct
cauaccugaagaccaaguuagcagc

SEQ ID NO: 576 - RNA, 25 nt, Artificial Sequence
  synthetic construct
accugaagaccaaguuuauagcagc

SEQ ID NO: 577 - RNA, 25 nt, Artificial Sequence
  synthetic construct
cugaagaccaaguuuaucuagcagc

SEQ ID NO: 578 - RNA, 25 nt, Artificial Sequence
  synthetic construct
gaagaccaaguuuaucuguagcagc

SEQ ID NO: 579 - RNA, 25 nt, Artificial Sequence
  synthetic construct
accaaguuuaucugugugaagcagc

SEQ ID NO: 580 - RNA, 25 nt, Artificial Sequence
  synthetic construct
caaguuuaucugugugacaagcagc

SEQ ID NO: 581 - RNA, 25 nt, Artificial Sequence
  synthetic construct
agauucauugaugcaguuuagcagc

SEQ ID NO: 582 - RNA, 25 nt, Artificial Sequence
  synthetic construct
gauucauugaugcaguuugagcagc

SEQ ID NO: 583 - RNA, 25 nt, Artificial Sequence
  synthetic construct
uucauugaugcaguuuggaagcagc

SEQ ID NO: 584 - RNA, 25 nt, Artificial Sequence
  synthetic construct
ucauugaugcaguuuggaaagcagc

SEQ ID NO: 585 - RNA, 25 nt, Artificial Sequence
  synthetic construct
uugaugcaguuuggaaauaagcagc

SEQ ID NO: 586 - RNA, 25 nt, Artificial Sequence
  synthetic construct
ugaugcaguuuggaaauaaagcagc

SEQ ID NO: 587 - RNA, 25 nt, Artificial Sequence
  synthetic construct
gaugcaguuuggaaauaauagcagc

SEQ ID NO: 588 - RNA, 25 nt, Artificial Sequence
  synthetic construct
gcaguuuggaaauaaugguagcagc

SEQ ID NO: 589 - RNA, 25 nt, Artificial Sequence
  synthetic construct
aguuuggaaauaauggugaagcagc

SEQ ID NO: 590 - RNA, 25 nt, Artificial Sequence
  synthetic construct
uggaaauaauggugaagguagcagc

SEQ ID NO: 591 - RNA, 25 nt, Artificial Sequence
  synthetic construct
auaauggugaaggugcugaagcagc

SEQ ID NO: 592 - RNA, 25 nt, Artificial Sequence
  synthetic construct
cugaaacuacuaacuuuguagcagc

SEQ ID NO: 593 - RNA, 25 nt, Artificial Sequence
  synthetic construct
aaacuacuaacuuugugguagcagc

SEQ ID NO: 594 - RNA, 25 nt, Artificial Sequence
  synthetic construct
aacuacuaacuuugugguuagcagc

SEQ ID NO: 595 - RNA, 25 nt, Artificial Sequence
  synthetic construct
acuacuaacuuugugguucagcagc

SEQ ID NO: 596 - RNA, 25 nt, Artificial Sequence
  synthetic construct
uaacuuugugguuccagauagcagc

SEQ ID NO: 597 - RNA, 25 nt, Artificial Sequence
  synthetic construct
cuuugugguuccagauuuuagcagc

SEQ ID NO: 598 - RNA, 25 nt, Artificial Sequence
  synthetic construct
uuugugguuccagauuuuuagcagc

SEQ ID NO: 599 - RNA, 25 nt, Artificial Sequence
  synthetic construct
uugugguuccagauuuuuuagcagc

SEQ ID NO: 600 - RNA, 25 nt, Artificial Sequence
  synthetic construct
aaauagagaaaugagugaaagcagc

SEQ ID NO: 601 - RNA, 25 nt, Artificial Sequence
  synthetic construct
aauagagaaaugagugaauagcagc

SEQ ID NO: 602 - RNA, 25 nt, Artificial Sequence
  synthetic construct
ggugaucugcuuuuaucuaagcagc

SEQ ID NO: 603 - RNA, 25 nt, Artificial Sequence
  synthetic construct
aucugcuuuuaucuaaaugagcagc

SEQ ID NO: 604 - RNA, 25 nt, Artificial Sequence
  synthetic construct
cugcuuuuaucuaaaugcaagcagc

SEQ ID NO: 605 - RNA, 25 nt, Artificial Sequence
  synthetic construct
augcaaauaaggauguguuagcagc

SEQ ID NO: 606 - RNA, 25 nt, Artificial Sequence
  synthetic construct
auaaggauguguucucugaagcagc

SEQ ID NO: 607 - RNA, 25 nt, Artificial Sequence
  synthetic construct
gaaaaaggaaaugucuuguagcagc

SEQ ID NO: 608 - RNA, 25 nt, Artificial Sequence
  synthetic construct
aaaaggaaaugucuuguguagcagc

SEQ ID NO: 609 - RNA, 25 nt, Artificial Sequence
  synthetic construct
aaaggaaaugucuuguguuagcagc

SEQ ID NO: 610 - RNA, 25 nt, Artificial Sequence
  synthetic construct
aggaaaugucuuguguuguagcagc

SEQ ID NO: 611 - RNA, 25 nt, Artificial Sequence
  synthetic construct
ggaaaugucuuguguuguuagcagc

SEQ ID NO: 612 - RNA, 25 nt, Artificial Sequence
  synthetic construct
gaaaugucuuguguuguuuagcagc

SEQ ID NO: 613 - RNA, 25 nt, Artificial Sequence
  synthetic construct
aaaugucuuguguuguuuuagcagc

SEQ ID NO: 614 - RNA, 25 nt, Artificial Sequence
  synthetic construct
aaugucuuguguuguuuugagcagc

SEQ ID NO: 615 - RNA, 25 nt, Artificial Sequence
  synthetic construct
augucuuguguuguuuuguagcagc

SEQ ID NO: 616 - RNA, 25 nt, Artificial Sequence
  synthetic construct
ugucuuguguuguuuuguuagcagc

SEQ ID NO: 617 - RNA, 25 nt, Artificial Sequence
  synthetic construct
gucuuguguuguuuuguucagcagc

SEQ ID NO: 618 - RNA, 25 nt, Artificial Sequence
  synthetic construct
cucagcagcuuuuuguuauagcagc

SEQ ID NO: 619 - RNA, 25 nt, Artificial Sequence
  synthetic construct
cagcagcuuuuuguuauugagcagc

SEQ ID NO: 620 - RNA, 25 nt, Artificial Sequence
  synthetic construct
agcagcuuuuuguuauuguagcagc

SEQ ID NO: 621 - RNA, 25 nt, Artificial Sequence
  synthetic construct
gcagcuuuuuguuauuguuagcagc

SEQ ID NO: 622 - RNA, 25 nt, Artificial Sequence
  synthetic construct
cagcuuuuuguuauuguugagcagc

SEQ ID NO: 623 - RNA, 25 nt, Artificial Sequence
  synthetic construct
agcuuuuuguuauuguuguagcagc

SEQ ID NO: 624 - RNA, 25 nt, Artificial Sequence
  synthetic construct
gcuuuuuguuauuguuguuagcagc

SEQ ID NO: 625 - RNA, 25 nt, Artificial Sequence
  synthetic construct
cuuuuuguuauuguuguugagcagc

SEQ ID NO: 626 - RNA, 25 nt, Artificial Sequence
  synthetic construct
uuuuuguuauuguuguuguagcagc

SEQ ID NO: 627 - RNA, 25 nt, Artificial Sequence
  synthetic construct
uuuuguuauuguuguuguuagcagc

SEQ ID NO: 628 - RNA, 25 nt, Artificial Sequence
  synthetic construct
uuuguuauuguuguuguugagcagc

SEQ ID NO: 629 - RNA, 25 nt, Artificial Sequence
  synthetic construct
uuguuauuguuguuguuguagcagc

SEQ ID NO: 630 - RNA, 25 nt, Artificial Sequence
  synthetic construct
uguuauuguuguuguuguuagcagc

SEQ ID NO: 631 - RNA, 25 nt, Artificial Sequence
  synthetic construct
guuauuguuguuguuguucagcagc

SEQ ID NO: 632 - RNA, 25 nt, Artificial Sequence
  synthetic construct
uuauuguuguuguuguucuagcagc

SEQ ID NO: 633 - RNA, 25 nt, Artificial Sequence
  synthetic construct
uauuguuguuguuguucuuagcagc

SEQ ID NO: 634 - RNA, 25 nt, Artificial Sequence
  synthetic construct
auuguuguuguuguucuuaagcagc

SEQ ID NO: 635 - RNA, 25 nt, Artificial Sequence
  synthetic construct
uguuguuguuguucuuagaagcagc

SEQ ID NO: 636 - RNA, 25 nt, Artificial Sequence
  synthetic construct
uuguuguuguucuuagacaagcagc

SEQ ID NO: 637 - RNA, 25 nt, Artificial Sequence
  synthetic construct
uguuguuguucuuagacaaagcagc

SEQ ID NO: 638 - RNA, 25 nt, Artificial Sequence
  synthetic construct
cuuuuuaaccuugcugacaagcagc

SEQ ID NO: 639 - RNA, 25 nt, Artificial Sequence
  synthetic construct
uuaaccuugcugacauccaagcagc

SEQ ID NO: 640 - RNA, 25 nt, Artificial Sequence
  synthetic construct
uugcugacauccaaauagaagcagc

SEQ ID NO: 641 - RNA, 25 nt, Artificial Sequence
  synthetic construct
agguuucuuuuuaaauuaaagcagc

SEQ ID NO: 642 - RNA, 25 nt, Artificial Sequence
  synthetic construct
aaauuaagaaauaauaacaagcagc

SEQ ID NO: 643 - RNA, 25 nt, Artificial Sequence
  synthetic construct
aauuaagaaauaauaacaaagcagc

SEQ ID NO: 644 - RNA, 25 nt, Artificial Sequence
  synthetic construct
auuaagaaauaauaacaauagcagc

SEQ ID NO: 645 - RNA, 25 nt, Artificial Sequence
  synthetic construct
uaagaaauaauaacaauuaagcagc

SEQ ID NO: 646 - RNA, 25 nt, Artificial Sequence
  synthetic construct
aagaaauaauaacaauuaaagcagc

SEQ ID NO: 647 - RNA, 25 nt, Artificial Sequence
  synthetic construct
agaaauaauaacaauuaaaagcagc

SEQ ID NO: 648 - RNA, 25 nt, Artificial Sequence
  synthetic construct
acuaaaaguacaaaaaauuagcagc

SEQ ID NO: 649 - RNA, 25 nt, Artificial Sequence
  synthetic construct
cuaaaaguacaaaaaauuaagcagc

SEQ ID NO: 650 - RNA, 25 nt, Artificial Sequence
  synthetic construct
agacuuauuuuccuuuguaagcagc

SEQ ID NO: 651 - RNA, 25 nt, Artificial Sequence
  synthetic construct
auuuuccuuuguaauguauagcagc

SEQ ID NO: 652 - RNA, 25 nt, Artificial Sequence
  synthetic construct
aguuacagguuggacaugaagcagc

SEQ ID NO: 653 - RNA, 25 nt, Artificial Sequence
  synthetic construct
uguggaauucuguuuguuaagcagc

SEQ ID NO: 654 - RNA, 25 nt, Artificial Sequence
  synthetic construct
ggaauucuguuuguuaaauagcagc

SEQ ID NO: 655 - RNA, 25 nt, Artificial Sequence
  synthetic construct
auucuguuuguuaaaucaaagcagc

SEQ ID NO: 656 - RNA, 25 nt, Artificial Sequence
  synthetic construct
uguuuguuaaaucaaauuaagcagc

SEQ ID NO: 657 - RNA, 25 nt, Artificial Sequence
  synthetic construct
acauaauaagcuuaacugaagcagc

SEQ ID NO: 658 - RNA, 25 nt, Artificial Sequence
  synthetic construct
acugauaaacagaauauuuagcagc

SEQ ID NO: 659 - RNA, 25 nt, Artificial Sequence
  synthetic construct
cugauaaacagaauauuuaagcagc

SEQ ID NO: 660 - RNA, 25 nt, Artificial Sequence
  synthetic construct
uaguguaaaaauuuauauuagcagc

SEQ ID NO: 661 - RNA, 25 nt, Artificial Sequence
  synthetic construct
guguaaaaauuuauauuauagcagc

SEQ ID NO: 662 - RNA, 25 nt, Artificial Sequence
  synthetic construct
uaaaaauuuauauuauuguagcagc

SEQ ID NO: 663 - RNA, 25 nt, Artificial Sequence
  synthetic construct
aaaaauuuauauuauugugagcagc

SEQ ID NO: 664 - RNA, 25 nt, Artificial Sequence
  synthetic construct
uuuaacuuccagaaauaaaagcagc

SEQ ID NO: 665 - RNA, 27 nt, Artificial Sequence
  synthetic construct
gcugcuauuaugaaacaccaaaguggg

SEQ ID NO: 666 - RNA, 27 nt, Artificial Sequence
  synthetic construct
gcugcuagauuaugaaacaccaaaggg

SEQ ID NO: 667 - RNA, 27 nt, Artificial Sequence
  synthetic construct
gcugcuaacauucgacucuugcagggg

SEQ ID NO: 668 - RNA, 27 nt, Artificial Sequence
  synthetic construct
gcugcugaacauucgacucuugcaggg

SEQ ID NO: 669 - RNA, 27 nt, Artificial Sequence
  synthetic construct
gcugcuagaacauucgacucuugcagg

SEQ ID NO: 670 - RNA, 27 nt, Artificial Sequence
  synthetic construct
gcugcuuagagaacauucgacucuugg

SEQ ID NO: 671 - RNA, 27 nt, Artificial Sequence
  synthetic construct
gcugcuauagagaacauucgacucugg

SEQ ID NO: 672 - RNA, 27 nt, Artificial Sequence
  synthetic construct
gcugcuugauagagaacauucgacugg

SEQ ID NO: 673 - RNA, 27 nt, Artificial Sequence
  synthetic construct
gcugcucugauagagaacauucgacgg

SEQ ID NO: 674 - RNA, 27 nt, Artificial Sequence
  synthetic construct
gcugcuaaacugcuugauucuucgugg

SEQ ID NO: 675 - RNA, 27 nt, Artificial Sequence
  synthetic construct
gcugcugaaacugcuugauucuucggg

SEQ ID NO: 676 - RNA, 27 nt, Artificial Sequence
  synthetic construct
gcugcuagaaacugcuugauucuucgg

SEQ ID NO: 677 - RNA, 27 nt, Artificial Sequence
  synthetic construct
gcugcuuccauuggcuucucaagaugg

SEQ ID NO: 678 - RNA, 27 nt, Artificial Sequence
  synthetic construct
gcugcuauuuucuguucuagauccugg

SEQ ID NO: 679 - RNA, 27 nt, Artificial Sequence
  synthetic construct
gcugcuuucauuuucuguucuagaugg

SEQ ID NO: 680 - RNA, 27 nt, Artificial Sequence
  synthetic construct
gcugcugaaaucaaagucauccugggg

SEQ ID NO: 681 - RNA, 27 nt, Artificial Sequence
  synthetic construct
gcugcuugaaaucaaagucauccuggg

SEQ ID NO: 682 - RNA, 27 nt, Artificial Sequence
  synthetic construct
gcugcuuugaaaucaaagucauccugg

SEQ ID NO: 683 - RNA, 27 nt, Artificial Sequence
  synthetic construct
gcugcuuaguugaaaucaaagucaugg

SEQ ID NO: 684 - RNA, 27 nt, Artificial Sequence
  synthetic construct
gcugcuauaguugaaaucaaagucagg

SEQ ID NO: 685 - RNA, 27 nt, Artificial Sequence
  synthetic construct
gcugcuuauaguugaaaucaaagucgg

SEQ ID NO: 686 - RNA, 27 nt, Artificial Sequence
  synthetic construct
gcugcuuuauaguugaaaucaaagugg

SEQ ID NO: 687 - RNA, 27 nt, Artificial Sequence
  synthetic construct
gcugcuuuuauaguugaaaucaaaggg

SEQ ID NO: 688 - RNA, 27 nt, Artificial Sequence
  synthetic construct
gcugcuuuguuuccauucagaucuugg

SEQ ID NO: 689 - RNA, 27 nt, Artificial Sequence
  synthetic construct
gcugcuugguuguuuccauucagaugg

SEQ ID NO: 690 - RNA, 27 nt, Artificial Sequence
  synthetic construct
gcugcuacugguuguuuccauucaggg

SEQ ID NO: 691 - RNA, 27 nt, Artificial Sequence
  synthetic construct
gcugcuugacguuauccaguuuucugg

SEQ ID NO: 692 - RNA, 27 nt, Artificial Sequence
  synthetic construct
gcugcuaugacguuauccaguuuucgg

SEQ ID NO: 693 - RNA, 27 nt, Artificial Sequence
  synthetic construct
gcugcuuaaugacguuauccaguuugg

SEQ ID NO: 694 - RNA, 27 nt, Artificial Sequence
  synthetic construct
gcugcuugcuaaugacguuauccaggg

SEQ ID NO: 695 - RNA, 27 nt, Artificial Sequence
  synthetic construct
gcugcuucugcuaaugacguuauccgg

SEQ ID NO: 696 - RNA, 27 nt, Artificial Sequence
  synthetic construct
gcugcuuucugcuaaugacguuaucgg

SEQ ID NO: 697 - RNA, 27 nt, Artificial Sequence
  synthetic construct
gcugcuauucugcuaaugacguuaugg

SEQ ID NO: 698 - RNA, 27 nt, Artificial Sequence
  synthetic construct
gcugcuuccaguuucuuaauuuguugg

SEQ ID NO: 699 - RNA, 27 nt, Artificial Sequence
  synthetic construct
gcugcuaaacuuuuugcugcaacucgg

SEQ ID NO: 700 - RNA, 27 nt, Artificial Sequence
  synthetic construct
gcugcugaaacuuuuugcugcaacugg

SEQ ID NO: 701 - RNA, 27 nt, Artificial Sequence
  synthetic construct
gcugcuucauuaaguuucuaaacaggg

SEQ ID NO: 702 - RNA, 27 nt, Artificial Sequence
  synthetic construct
gcugcucacuuuucauuaaguuucugg

SEQ ID NO: 703 - RNA, 27 nt, Artificial Sequence
  synthetic construct
gcugcuugacuuuaguagugaacuggg

SEQ ID NO: 704 - RNA, 27 nt, Artificial Sequence
  synthetic construct
gcugcuucaacucagggaauuugacgg

SEQ ID NO: 705 - RNA, 27 nt, Artificial Sequence
  synthetic construct
gcugcuuaauucaacucagggaauugg

SEQ ID NO: 706 - RNA, 27 nt, Artificial Sequence
  synthetic construct
gcugcuauaauucaacucagggaaugg

SEQ ID NO: 707 - RNA, 27 nt, Artificial Sequence
  synthetic construct
gcugcuugauaauucaacucagggagg

SEQ ID NO: 708 - RNA, 27 nt, Artificial Sequence
  synthetic construct
gcugcugcugauaauucaacucagggg

SEQ ID NO: 709 - RNA, 27 nt, Artificial Sequence
  synthetic construct
gcugcuagcugauaauucaacucaggg

SEQ ID NO: 710 - RNA, 27 nt, Artificial Sequence
  synthetic construct
gcugcuaagcugauaauucaacucagg

SEQ ID NO: 711 - RNA, 27 nt, Artificial Sequence
  synthetic construct
gcugcuuaagcugauaauucaacucgg

SEQ ID NO: 712 - RNA, 27 nt, Artificial Sequence
  synthetic construct
gcugcuuuaagcugauaauucaacugg

SEQ ID NO: 713 - RNA, 27 nt, Artificial Sequence
  synthetic construct
gcugcuuuuaagcugauaauucaacgg

SEQ ID NO: 714 - RNA, 27 nt, Artificial Sequence
  synthetic construct
gcugcuuuuuaagcugauaauucaagg

SEQ ID NO: 715 - RNA, 27 nt, Artificial Sequence
  synthetic construct
gcugcuauuuuaagcugauaauucagg

SEQ ID NO: 716 - RNA, 27 nt, Artificial Sequence
  synthetic construct
gcugcuuaauuuuaagcugauaauugg

SEQ ID NO: 717 - RNA, 27 nt, Artificial Sequence
  synthetic construct
gcugcuuuaauuuuaagcugauaaugg

SEQ ID NO: 718 - RNA, 27 nt, Artificial Sequence
  synthetic construct
gcugcuacacuuuaauuuuaagcuggg

SEQ ID NO: 719 - RNA, 27 nt, Artificial Sequence
  synthetic construct
gcugcucacacuuuaauuuuaagcugg

SEQ ID NO: 720 - RNA, 27 nt, Artificial Sequence
  synthetic construct
gcugcuucaaugcacacuuuaauuugg

SEQ ID NO: 721 - RNA, 27 nt, Artificial Sequence
  synthetic construct
gcugcuucuuugucaaugcacacuugg

SEQ ID NO: 722 - RNA, 27 nt, Artificial Sequence
  synthetic construct
gcugcuuccauguucaucacuuuuggg

SEQ ID NO: 723 - RNA, 27 nt, Artificial Sequence
  synthetic construct
gcugcuauucuuccauguucaucacgg

SEQ ID NO: 724 - RNA, 27 nt, Artificial Sequence
  synthetic construct
gcugcuucaaguguuugaauucugcgg

SEQ ID NO: 725 - RNA, 27 nt, Artificial Sequence
  synthetic construct
gcugcuaucagggaagcaucacaaugg

SEQ ID NO: 726 - RNA, 27 nt, Artificial Sequence
  synthetic construct
gcugcuaucaccacaacuggcaagggg

SEQ ID NO: 727 - RNA, 27 nt, Artificial Sequence
  synthetic construct
gcugcuagaucaccacaacuggcaagg

SEQ ID NO: 728 - RNA, 27 nt, Artificial Sequence
  synthetic construct
gcugcuaaaaguuuacauucuuggggg

SEQ ID NO: 729 - RNA, 27 nt, Artificial Sequence
  synthetic construct
gcugcuaaaaaguuuacauucuugggg

SEQ ID NO: 730 - RNA, 27 nt, Artificial Sequence
  synthetic construct
gcugcuaaaaaaguuuacauucuuggg

SEQ ID NO: 731 - RNA, 27 nt, Artificial Sequence
  synthetic construct
gcugcuuaaaaaaguuuacauucuugg

SEQ ID NO: 732 - RNA, 27 nt, Artificial Sequence
  synthetic construct
gcugcuguaaaaaaguuuacauucugg

SEQ ID NO: 733 - RNA, 27 nt, Artificial Sequence
  synthetic construct
gcugcuugguaaaaaaguuuacauugg

SEQ ID NO: 734 - RNA, 27 nt, Artificial Sequence
  synthetic construct
gcugcuugaauaauucacaccaggugg

SEQ ID NO: 735 - RNA, 27 nt, Artificial Sequence
  synthetic construct
gcugcuccugaauaauucacaccaggg

SEQ ID NO: 736 - RNA, 27 nt, Artificial Sequence
  synthetic construct
gcugcuacccugaauaauucacaccgg

SEQ ID NO: 737 - RNA, 27 nt, Artificial Sequence
  synthetic construct
gcugcuacacccugaauaauucacagg

SEQ ID NO: 738 - RNA, 27 nt, Artificial Sequence
  synthetic construct
gcugcuggucaaugauauuguccaggg

SEQ ID NO: 739 - RNA, 27 nt, Artificial Sequence
  synthetic construct
gcugcuaaggucaaugauauuguccgg

SEQ ID NO: 740 - RNA, 27 nt, Artificial Sequence
  synthetic construct
gcugcucaaggucaaugauauugucgg

SEQ ID NO: 741 - RNA, 27 nt, Artificial Sequence
  synthetic construct
gcugcuacaaggucaaugauauugugg

SEQ ID NO: 742 - RNA, 27 nt, Artificial Sequence
  synthetic construct
gcugcucacaaggucaaugauauuggg

SEQ ID NO: 743 - RNA, 27 nt, Artificial Sequence
  synthetic construct
gcugcuucacaaggucaaugauauugg

SEQ ID NO: 744 - RNA, 27 nt, Artificial Sequence
  synthetic construct
gcugcuuucacaaggucaaugauaugg

SEQ ID NO: 745 - RNA, 27 nt, Artificial Sequence
  synthetic construct
gcugcuuuucacaaggucaaugauagg

SEQ ID NO: 746 - RNA, 27 nt, Artificial Sequence
  synthetic construct
gcugcuuuuucacaaggucaaugaugg

SEQ ID NO: 747 - RNA, 27 nt, Artificial Sequence
  synthetic construct
gcugcuuuuuucacaaggucaaugagg

SEQ ID NO: 748 - RNA, 27 nt, Artificial Sequence
  synthetic construct
gcugcuacuuuuucacaaggucaaugg

SEQ ID NO: 749 - RNA, 27 nt, Artificial Sequence
  synthetic construct
gcugcuuacuuuuucacaaggucaagg

SEQ ID NO: 750 - RNA, 27 nt, Artificial Sequence
  synthetic construct
gcugcuuguacuuuuucacaaggucgg

SEQ ID NO: 751 - RNA, 27 nt, Artificial Sequence
  synthetic construct
gcugcuauguacuuuuucacaaggugg

SEQ ID NO: 752 - RNA, 27 nt, Artificial Sequence
  synthetic construct
gcugcuugaaucuuagcaggaaggugg

SEQ ID NO: 753 - RNA, 27 nt, Artificial Sequence
  synthetic construct
gcugcuuguuguucagcugcugcuugg

SEQ ID NO: 754 - RNA, 27 nt, Artificial Sequence
  synthetic construct
gcugcuauguuguucagcugcugcugg

SEQ ID NO: 755 - RNA, 27 nt, Artificial Sequence
  synthetic construct
gcugcuacauguuguucagcugcuggg

SEQ ID NO: 756 - RNA, 27 nt, Artificial Sequence
  synthetic construct
gcugcugacauguuguucagcugcugg

SEQ ID NO: 757 - RNA, 27 nt, Artificial Sequence
  synthetic construct
gcugcuaaaugacauguuguucagcgg

SEQ ID NO: 758 - RNA, 27 nt, Artificial Sequence
  synthetic construct
gcugcucaaaugacauguuguucaggg

SEQ ID NO: 759 - RNA, 27 nt, Artificial Sequence
  synthetic construct
gcugcugcaaaugacauguuguucagg

SEQ ID NO: 760 - RNA, 27 nt, Artificial Sequence
  synthetic construct
gcugcuagcaaaugacauguuguucgg

SEQ ID NO: 761 - RNA, 27 nt, Artificial Sequence
  synthetic construct
gcugcucagcaaaugacauguuguugg

SEQ ID NO: 762 - RNA, 27 nt, Artificial Sequence
  synthetic construct
gcugcuucagcaaaugacauguugugg

SEQ ID NO: 763 - RNA, 27 nt, Artificial Sequence
  synthetic construct
gcugcuauuucagcaaaugacaugugg

SEQ ID NO: 764 - RNA, 27 nt, Artificial Sequence
  synthetic construct
gcugcuugauuucagcaaaugacaugg

SEQ ID NO: 765 - RNA, 27 nt, Artificial Sequence
  synthetic construct
gcugcuaugauuucagcaaaugacagg

SEQ ID NO: 766 - RNA, 27 nt, Artificial Sequence
  synthetic construct
gcugcuccaugaugauuucagcaaagg

SEQ ID NO: 767 - RNA, 27 nt, Artificial Sequence
  synthetic construct
gcugcuaacuuggucuucagguauggg

SEQ ID NO: 768 - RNA, 27 nt, Artificial Sequence
  synthetic construct
gcugcuauaaacuuggucuucaggugg

SEQ ID NO: 769 - RNA, 27 nt, Artificial Sequence
  synthetic construct
gcugcuagauaaacuuggucuucaggg

SEQ ID NO: 770 - RNA, 27 nt, Artificial Sequence
  synthetic construct
gcugcuacagauaaacuuggucuucgg

SEQ ID NO: 771 - RNA, 27 nt, Artificial Sequence
  synthetic construct
gcugcuucacacagauaaacuuggugg

SEQ ID NO: 772 - RNA, 27 nt, Artificial Sequence
  synthetic construct
gcugcuugucacacagauaaacuuggg

SEQ ID NO: 773 - RNA, 27 nt, Artificial Sequence
  synthetic construct
gcugcuaaacugcaucaaugaaucugg

SEQ ID NO: 774 - RNA, 27 nt, Artificial Sequence
  synthetic construct
gcugcucaaacugcaucaaugaaucgg

SEQ ID NO: 775 - RNA, 27 nt, Artificial Sequence
  synthetic construct
gcugcuuccaaacugcaucaaugaagg

SEQ ID NO: 776 - RNA, 27 nt, Artificial Sequence
  synthetic construct
gcugcuuuccaaacugcaucaaugagg

SEQ ID NO: 777 - RNA, 27 nt, Artificial Sequence
  synthetic construct
gcugcuuauuuccaaacugcaucaagg

SEQ ID NO: 778 - RNA, 27 nt, Artificial Sequence
  synthetic construct
gcugcuuuauuuccaaacugcaucagg

SEQ ID NO: 779 - RNA, 27 nt, Artificial Sequence
  synthetic construct
gcugcuauuauuuccaaacugcaucgg

SEQ ID NO: 780 - RNA, 27 nt, Artificial Sequence
  synthetic construct
gcugcuaccauuauuuccaaacugcgg

SEQ ID NO: 781 - RNA, 27 nt, Artificial Sequence
  synthetic construct
gcugcuucaccauuauuuccaaacugg

SEQ ID NO: 782 - RNA, 27 nt, Artificial Sequence
  synthetic construct
gcugcuaccuucaccauuauuuccagg

SEQ ID NO: 783 - RNA, 27 nt, Artificial Sequence
  synthetic construct
gcugcuucagcaccuucaccauuaugg

SEQ ID NO: 784 - RNA, 27 nt, Artificial Sequence
  synthetic construct
gcugcuacaaaguuaguaguuucaggg

SEQ ID NO: 785 - RNA, 27 nt, Artificial Sequence
  synthetic construct
gcugcuaccacaaaguuaguaguuugg

SEQ ID NO: 786 - RNA, 27 nt, Artificial Sequence
  synthetic construct
gcugcuaaccacaaaguuaguaguugg

SEQ ID NO: 787 - RNA, 27 nt, Artificial Sequence
  synthetic construct
gcugcugaaccacaaaguuaguagugg

SEQ ID NO: 788 - RNA, 27 nt, Artificial Sequence
  synthetic construct
gcugcuaucuggaaccacaaaguuagg

SEQ ID NO: 789 - RNA, 27 nt, Artificial Sequence
  synthetic construct
gcugcuaaaaucuggaaccacaaaggg

SEQ ID NO: 790 - RNA, 27 nt, Artificial Sequence
  synthetic construct
gcugcuaaaaaucuggaaccacaaagg

SEQ ID NO: 791 - RNA, 27 nt, Artificial Sequence
  synthetic construct
gcugcuaaaaaaucuggaaccacaagg

SEQ ID NO: 792 - RNA, 27 nt, Artificial Sequence
  synthetic construct
gcugcuuucacucauuucucuauuugg

SEQ ID NO: 793 - RNA, 27 nt, Artificial Sequence
  synthetic construct
gcugcuauucacucauuucucuauugg

SEQ ID NO: 794 - RNA, 27 nt, Artificial Sequence
  synthetic construct
gcugcuuagauaaaagcagaucaccgg

SEQ ID NO: 795 - RNA, 27 nt, Artificial Sequence
  synthetic construct
gcugcucauuuagauaaaagcagaugg

SEQ ID NO: 796 - RNA, 27 nt, Artificial Sequence
  synthetic construct
gcugcuugcauuuagauaaaagcaggg

SEQ ID NO: 797 - RNA, 27 nt, Artificial Sequence
  synthetic construct
gcugcuaacacauccuuauuugcaugg

SEQ ID NO: 798 - RNA, 27 nt, Artificial Sequence
  synthetic construct
gcugcuucagagaacacauccuuaugg

SEQ ID NO: 799 - RNA, 27 nt, Artificial Sequence
  synthetic construct
gcugcuacaagacauuuccuuuuucgg

SEQ ID NO: 800 - RNA, 27 nt, Artificial Sequence
  synthetic construct
gcugcuacacaagacauuuccuuuugg

SEQ ID NO: 801 - RNA, 27 nt, Artificial Sequence
  synthetic construct
gcugcuaacacaagacauuuccuuugg

SEQ ID NO: 802 - RNA, 27 nt, Artificial Sequence
  synthetic construct
gcugcuacaacacaagacauuuccugg

SEQ ID NO: 803 - RNA, 27 nt, Artificial Sequence
  synthetic construct
gcugcuaacaacacaagacauuuccgg

SEQ ID NO: 804 - RNA, 27 nt, Artificial Sequence
  synthetic construct
gcugcuaaacaacacaagacauuucgg

SEQ ID NO: 805 - RNA, 27 nt, Artificial Sequence
  synthetic construct
gcugcuaaaacaacacaagacauuugg

SEQ ID NO: 806 - RNA, 27 nt, Artificial Sequence
  synthetic construct
gcugcucaaaacaacacaagacauugg

SEQ ID NO: 807 - RNA, 27 nt, Artificial Sequence
  synthetic construct
gcugcuacaaaacaacacaagacaugg

SEQ ID NO: 808 - RNA, 27 nt, Artificial Sequence
  synthetic construct
gcugcuaacaaaacaacacaagacagg

SEQ ID NO: 809 - RNA, 27 nt, Artificial Sequence
  synthetic construct
gcugcugaacaaaacaacacaagacgg

SEQ ID NO: 810 - RNA, 27 nt, Artificial Sequence
  synthetic construct
gcugcuauaacaaaaagcugcugaggg

SEQ ID NO: 811 - RNA, 27 nt, Artificial Sequence
  synthetic construct
gcugcucaauaacaaaaagcugcuggg

SEQ ID NO: 812 - RNA, 27 nt, Artificial Sequence
  synthetic construct
gcugcuacaauaacaaaaagcugcugg

SEQ ID NO: 813 - RNA, 27 nt, Artificial Sequence
  synthetic construct
gcugcuaacaauaacaaaaagcugcgg

SEQ ID NO: 814 - RNA, 27 nt, Artificial Sequence
  synthetic construct
gcugcucaacaauaacaaaaagcuggg

SEQ ID NO: 815 - RNA, 27 nt, Artificial Sequence
  synthetic construct
gcugcuacaacaauaacaaaaagcugg

SEQ ID NO: 816 - RNA, 27 nt, Artificial Sequence
  synthetic construct
gcugcuaacaacaauaacaaaaagcgg

SEQ ID NO: 817 - RNA, 27 nt, Artificial Sequence
  synthetic construct
gcugcucaacaacaauaacaaaaaggg

SEQ ID NO: 818 - RNA, 27 nt, Artificial Sequence
  synthetic construct
gcugcuacaacaacaauaacaaaaagg

SEQ ID NO: 819 - RNA, 27 nt, Artificial Sequence
  synthetic construct
gcugcuaacaacaacaauaacaaaagg

SEQ ID NO: 820 - RNA, 27 nt, Artificial Sequence
  synthetic construct
gcugcucaacaacaacaauaacaaagg

SEQ ID NO: 821 - RNA, 27 nt, Artificial Sequence
  synthetic construct
gcugcuacaacaacaacaauaacaagg

SEQ ID NO: 822 - RNA, 27 nt, Artificial Sequence
  synthetic construct
gcugcuaacaacaacaacaauaacagg

SEQ ID NO: 823 - RNA, 27 nt, Artificial Sequence
  synthetic construct
gcugcugaacaacaacaacaauaacgg

SEQ ID NO: 824 - RNA, 27 nt, Artificial Sequence
  synthetic construct
gcugcuagaacaacaacaacaauaagg

SEQ ID NO: 825 - RNA, 27 nt, Artificial Sequence
  synthetic construct
gcugcuaagaacaacaacaacaauagg

SEQ ID NO: 826 - RNA, 27 nt, Artificial Sequence
  synthetic construct
gcugcuuaagaacaacaacaacaaugg

SEQ ID NO: 827 - RNA, 27 nt, Artificial Sequence
  synthetic construct
gcugcuucuaagaacaacaacaacagg

SEQ ID NO: 828 - RNA, 27 nt, Artificial Sequence
  synthetic construct
gcugcuugucuaagaacaacaacaagg

SEQ ID NO: 829 - RNA, 27 nt, Artificial Sequence
  synthetic construct
gcugcuuugucuaagaacaacaacagg

SEQ ID NO: 830 - RNA, 27 nt, Artificial Sequence
  synthetic construct
gcugcuugucagcaagguuaaaaaggg

SEQ ID NO: 831 - RNA, 27 nt, Artificial Sequence
  synthetic construct
gcugcuuggaugucagcaagguuaagg

SEQ ID NO: 832 - RNA, 27 nt, Artificial Sequence
  synthetic construct
gcugcuucuauuuggaugucagcaagg

SEQ ID NO: 833 - RNA, 27 nt, Artificial Sequence
  synthetic construct
gcugcuuuaauuuaaaaagaaaccugg

SEQ ID NO: 834 - RNA, 27 nt, Artificial Sequence
  synthetic construct
gcugcuuguuauuauuucuuaauuugg

SEQ ID NO: 835 - RNA, 27 nt, Artificial Sequence
  synthetic construct
gcugcuuuguuauuauuucuuaauugg

SEQ ID NO: 836 - RNA, 27 nt, Artificial Sequence
  synthetic construct
gcugcuauuguuauuauuucuuaaugg

SEQ ID NO: 837 - RNA, 27 nt, Artificial Sequence
  synthetic construct
gcugcuuaauuguuauuauuucuuagg

SEQ ID NO: 838 - RNA, 27 nt, Artificial Sequence
  synthetic construct
gcugcuuuaauuguuauuauuucuugg

SEQ ID NO: 839 - RNA, 27 nt, Artificial Sequence
  synthetic construct
gcugcuuuuaauuguuauuauuucugg

SEQ ID NO: 840 - RNA, 27 nt, Artificial Sequence
  synthetic construct
gcugcuaauuuuuuguacuuuuagugg

SEQ ID NO: 841 - RNA, 27 nt, Artificial Sequence
  synthetic construct
gcugcuuaauuuuuuguacuuuuaggg

SEQ ID NO: 842 - RNA, 27 nt, Artificial Sequence
  synthetic construct
gcugcuuacaaaggaaaauaagucugg

SEQ ID NO: 843 - RNA, 27 nt, Artificial Sequence
  synthetic construct
gcugcuauacauuacaaaggaaaaugg

SEQ ID NO: 844 - RNA, 27 nt, Artificial Sequence
  synthetic construct
gcugcuucauguccaaccuguaacugg

SEQ ID NO: 845 - RNA, 27 nt, Artificial Sequence
  synthetic construct
gcugcuuaacaaacagaauuccacagg

SEQ ID NO: 846 - RNA, 27 nt, Artificial Sequence
  synthetic construct
gcugcuauuuaacaaacagaauuccgg

SEQ ID NO: 847 - RNA, 27 nt, Artificial Sequence
  synthetic construct
gcugcuuugauuuaacaaacagaaugg

SEQ ID NO: 848 - RNA, 27 nt, Artificial Sequence
  synthetic construct
gcugcuuaauuugauuuaacaaacagg

SEQ ID NO: 849 - RNA, 27 nt, Artificial Sequence
  synthetic construct
gcugcuucaguuaagcuuauuaugugg

SEQ ID NO: 850 - RNA, 27 nt, Artificial Sequence
  synthetic construct
gcugcuaaauauucuguuuaucagugg

SEQ ID NO: 851 - RNA, 27 nt, Artificial Sequence
  synthetic construct
gcugcuuaaauauucuguuuaucaggg

SEQ ID NO: 852 - RNA, 27 nt, Artificial Sequence
  synthetic construct
gcugcuaauauaaauuuuuacacuagg

SEQ ID NO: 853 - RNA, 27 nt, Artificial Sequence
  synthetic construct
gcugcuauaauauaaauuuuuacacgg

SEQ ID NO: 854 - RNA, 27 nt, Artificial Sequence
  synthetic construct
gcugcuacaauaauauaaauuuuuagg

SEQ ID NO: 855 - RNA, 27 nt, Artificial Sequence
  synthetic construct
gcugcucacaauaauauaaauuuuugg

SEQ ID NO: 856 - RNA, 27 nt, Artificial Sequence
  synthetic construct
gcugcuuuuauuucuggaaguuaaagg

SEQ ID NO: 857 - RNA, 36 nt, Artificial Sequence
  synthetic construct
ccaggaugacuuugauuucagcagccgaaaggcugc

SEQ ID NO: 858 - RNA, 36 nt, Artificial Sequence
  synthetic construct
caggaugacuuugauuucaagcagccgaaaggcugc

SEQ ID NO: 859 - RNA, 36 nt, Artificial Sequence
  synthetic construct
aggaugacuuugauuucaaagcagccgaaaggcugc

SEQ ID NO: 860 - RNA, 36 nt, Artificial Sequence
  synthetic construct
augacuuugauuucaacuaagcagccgaaaggcugc

SEQ ID NO: 861 - RNA, 36 nt, Artificial Sequence
  synthetic construct
cuuugguguuucauaaucuagcagccgaaaggcugc

SEQ ID NO: 862 - RNA, 36 nt, Artificial Sequence
  synthetic construct
ugacuuugauuucaacuauagcagccgaaaggcugc

SEQ ID NO: 863 - RNA, 36 nt, Artificial Sequence
  synthetic construct
gacuuugauuucaacuauaagcagccgaaaggcugc

SEQ ID NO: 864 - RNA, 36 nt, Artificial Sequence
  synthetic construct
aagaucugaauggaaacaaagcagccgaaaggcugc

SEQ ID NO: 865 - RNA, 36 nt, Artificial Sequence
  synthetic construct
gaaaacuggauaacgucauagcagccgaaaggcugc

SEQ ID NO: 866 - RNA, 36 nt, Artificial Sequence
  synthetic construct
cuggauaacgucauuagcaagcagccgaaaggcugc

SEQ ID NO: 867 - RNA, 36 nt, Artificial Sequence
  synthetic construct
cuguuuagaaacuuaaugaagcagccgaaaggcugc

SEQ ID NO: 868 - RNA, 36 nt, Artificial Sequence
  synthetic construct
agaaacuuaaugaaaagugagcagccgaaaggcugc

SEQ ID NO: 869 - RNA, 36 nt, Artificial Sequence
  synthetic construct
gucaaauucccugaguugaagcagccgaaaggcugc

SEQ ID NO: 870 - RNA, 36 nt, Artificial Sequence
  synthetic construct
auucccugaguugaauuauagcagccgaaaggcugc

SEQ ID NO: 871 - RNA, 36 nt, Artificial Sequence; identical to SEQ ID NO: 29
  synthetic construct

SEQ ID NO: 872 - RNA, 36 nt, Artificial Sequence; identical to SEQ ID NO: 33
  synthetic construct

SEQ ID NO: 873 - RNA, 36 nt, Artificial Sequence; identical to SEQ ID NO: 33
  synthetic construct

SEQ ID NO: 874 - RNA, 36 nt, Artificial Sequence
  synthetic construct
ugaauuaucagcuuaaaauagcagccgaaaggcugc

SEQ ID NO: 875 - RNA, 36 nt, Artificial Sequence
  synthetic construct
aauuaucagcuuaaaauuaagcagccgaaaggcugc

SEQ ID NO: 876 - RNA, 36 nt, Artificial Sequence
  synthetic construct
auuaucagcuuaaaauuaaagcagccgaaaggcugc

SEQ ID NO: 877 - RNA, 36 nt, Artificial Sequence
  synthetic construct
cagcuuaaaauuaaaguguagcagccgaaaggcugc

SEQ ID NO: 878 - RNA, 36 nt, Artificial Sequence
  synthetic construct
agcuuaaaauuaaagugugagcagccgaaaggcugc

SEQ ID NO: 879 - RNA, 36 nt, Artificial Sequence
  synthetic construct
ugugaauuauucaggguguagcagccgaaaggcugc

SEQ ID NO: 880 - RNA, 36 nt, Artificial Sequence
  synthetic construct
acaauaucauugaccuuguagcagccgaaaggcugc

SEQ ID NO: 881 - RNA, 36 nt, Artificial Sequence
  synthetic construct
aauaucauugaccuugugaagcagccgaaaggcugc

SEQ ID NO: 882 - RNA, 36 nt, Artificial Sequence
  synthetic construct
aucauugaccuugugaaaaagcagccgaaaggcugc

SEQ ID NO: 883 - RNA, 36 nt, Artificial Sequence
  synthetic construct
ugucauuugcugaaaucauagcagccgaaaggcugc

SEQ ID NO: 884 - RNA, 36 nt, Artificial Sequence
  synthetic construct
cugaagaccaaguuuaucuagcagccgaaaggcugc

SEQ ID NO: 885 - RNA, 36 nt, Artificial Sequence
  synthetic construct
caaguuuaucugugugacaagcagccgaaaggcugc

SEQ ID NO: 886 - RNA, 36 nt, Artificial Sequence
  synthetic construct
aguuuggaaauaauggugaagcagccgaaaggcugc

SEQ ID NO: 887 - RNA, 36 nt, Artificial Sequence
  synthetic construct
aaauagagaaaugagugaaagcagccgaaaggcugc

SEQ ID NO: 888 - RNA, 36 nt, Artificial Sequence
  synthetic construct
aauagagaaaugagugaauagcagccgaaaggcugc

SEQ ID NO: 889 - RNA, 36 nt, Artificial Sequence
  synthetic construct
uugugguuccagauuuuuuagcagccgaaaggcugc

SEQ ID NO: 890 - RNA, 36 nt, Artificial Sequence
  synthetic construct
uuugugguuccagauuuuuagcagccgaaaggcugc

SEQ ID NO: 891 - RNA, 36 nt, Artificial Sequence
  synthetic construct
uucauugaugcaguuuggaagcagccgaaaggcugc

SEQ ID NO: 892 - RNA, 36 nt, Artificial Sequence
  synthetic construct
ugaugcaguuuggaaauaaagcagccgaaaggcugc

SEQ ID NO: 893 - RNA, 36 nt, Artificial Sequence
  synthetic construct
acaugucauuugcugaaauagcagccgaaaggcugc

SEQ ID NO: 894 - RNA, 36 nt, Artificial Sequence
  synthetic construct
cuuugugguuccagauuuuagcagccgaaaggcugc

SEQ ID NO: 895 - RNA, 36 nt, Artificial Sequence
  synthetic construct
uaaaaauuuauauuauuguagcagccgaaaggcugc

SEQ ID NO: 896 - RNA, 36 nt, Artificial Sequence
  synthetic construct
ucauugaugcaguuuggaaagcagccgaaaggcugc

SEQ ID NO: 897 - RNA, 36 nt, Artificial Sequence
  synthetic construct
uuugcugaaaucaucauggagcagccgaaaggcugc

SEQ ID NO: 898 - RNA, 36 nt, Artificial Sequence
  synthetic construct
gaacaacaugucauuugcuagcagccgaaaggcugc

SEQ ID NO: 899 - RNA, 36 nt, Artificial Sequence
  synthetic construct
acaacaugucauuugcugaagcagccgaaaggcugc

SEQ ID NO: 900 - RNA, 36 nt, Artificial Sequence
  synthetic construct
aacaacaugucauuugcugagcagccgaaaggcugc

SEQ ID NO: 901 - RNA, 36 nt, Artificial Sequence
  synthetic construct
cgaagaaucaagcaguuucagcagccgaaaggcugc

SEQ ID NO: 902 - RNA, 36 nt, Artificial Sequence
  synthetic construct
ccuugccaguuguggugauagcagccgaaaggcugc

SEQ ID NO: 903 - RNA, 36 nt, Artificial Sequence
  synthetic construct
aacaaauuaagaaacuggaagcagccgaaaggcugc

SEQ ID NO: 904 - RNA, 36 nt, Artificial Sequence
  synthetic construct
cugaauggaaacaaccaguagcagccgaaaggcugc

SEQ ID NO: 905 - RNA, 36 nt, Artificial Sequence
  synthetic construct
aucuugagaagccaauggaagcagccgaaaggcugc

SEQ ID NO: 906 - RNA, 36 nt, Artificial Sequence
  synthetic construct
gaagaaucaagcaguuucuagcagccgaaaggcugc

SEQ ID NO: 907 - RNA, 36 nt, Artificial Sequence
  synthetic construct
uugccaguuguggugaucuagcagccgaaaggcugc

SEQ ID NO: 908 - RNA, 36 nt, Artificial Sequence
  synthetic construct
aucugaauggaaacaaccaagcagccgaaaggcugc

SEQ ID NO: 909 - RNA, 36 nt, Artificial Sequence
  synthetic construct
aucuagaacagaaaaugaaagcagccgaaaggcugc

SEQ ID NO: 910 - RNA, 36 nt, Artificial Sequence
  synthetic construct
aggaucuagaacagaaaauagcagccgaaaggcugc

SEQ ID NO: 911 - RNA, 36 nt, Artificial Sequence
  synthetic construct
aaaaauuuauauuauugugagcagccgaaaggcugc

SEQ ID NO: 912 - RNA, 36 nt, Artificial Sequence
  synthetic construct
guguaaaaauuuauauuauagcagccgaaaggcugc

SEQ ID NO: 913 - RNA, 36 nt, Artificial Sequence
  synthetic construct
aguugcagcaaaaaguuucagcagccgaaaggcugc

SEQ ID NO: 914 - RNA, 36 nt, Artificial Sequence
  synthetic construct
aagaauguaaacuuuuuuaagcagccgaaaggcugc

SEQ ID NO: 915 - RNA, 36 nt, Artificial Sequence
  synthetic construct
ugcaagagucgaauguucuagcagccgaaaggcugc

SEQ ID NO: 916 - RNA, 36 nt, Artificial Sequence
  synthetic construct
agauucauugaugcaguuuagcagccgaaaggcugc

SEQ ID NO: 917 - RNA, 36 nt, Artificial Sequence
  synthetic construct
gaguugcagcaaaaaguuuagcagccgaaaggcugc

SEQ ID NO: 918 - RNA, 36 nt, Artificial Sequence
  synthetic construct
gucgaauguucucuaucagagcagccgaaaggcugc

SEQ ID NO: 919 - RNA, 36 nt, Artificial Sequence
  synthetic construct
cccaagaauguaaacuuuuagcagccgaaaggcugc

SEQ ID NO: 920 - RNA, 36 nt, Artificial Sequence
  synthetic construct
gugaugaacauggaagaauagcagccgaaaggcugc

SEQ ID NO: 921 - RNA, 36 nt, Artificial Sequence
  synthetic construct
aagagucgaauguucucuaagcagccgaaaggcugc

SEQ ID NO: 922 - RNA, 36 nt, Artificial Sequence
  synthetic construct
gauucauugaugcaguuugagcagccgaaaggcugc

SEQ ID NO: 923 - RNA, 36 nt, Artificial Sequence
  synthetic construct
agagucgaauguucucuauagcagccgaaaggcugc

SEQ ID NO: 924 - RNA, 36 nt, Artificial Sequence
  synthetic construct
agucgaauguucucuaucaagcagccgaaaggcugc

SEQ ID NO: 925 - RNA, 36 nt, Artificial Sequence
  synthetic construct
cuggugugaauuauucaggagcagccgaaaggcugc

SEQ ID NO: 926 - RNA, 36 nt, Artificial Sequence
  synthetic construct
ccugcaagagucgaauguuagcagccgaaaggcugc

SEQ ID NO: 927 - RNA, 36 nt, Artificial Sequence
  synthetic construct
accuuccugcuaagauucaagcagccgaaaggcugc

SEQ ID NO: 928 - RNA, 36 nt, Artificial Sequence
  synthetic construct
accuggugugaauuauucaagcagccgaaaggcugc

SEQ ID NO: 929 - RNA, 36 nt, Artificial Sequence
  synthetic construct
agaauguaaacuuuuuuacagcagccgaaaggcugc

SEQ ID NO: 930 - RNA, 36 nt, Artificial Sequence
  synthetic construct
caguucacuacuaaagucaagcagccgaaaggcugc

SEQ ID NO: 931 - RNA, 36 nt, Artificial Sequence
  synthetic construct
caagaauguaaacuuuuuuagcagccgaaaggcugc

SEQ ID NO: 932 - RNA, 36 nt, Artificial Sequence
  synthetic construct
cugcaagagucgaauguucagcagccgaaaggcugc

SEQ ID NO: 933 - RNA, 36 nt, Artificial Sequence
  synthetic construct
ggugugaauuauucaggguagcagccgaaaggcugc

SEQ ID NO: 934 - RNA, 36 nt, Artificial Sequence
  synthetic construct
ccaagaauguaaacuuuuuagcagccgaaaggcugc

SEQ ID NO: 935 - RNA, 36 nt, Artificial Sequence
  synthetic construct
agcagcagcugaacaacauagcagccgaaaggcugc

SEQ ID NO: 936 - RNA, 36 nt, Artificial Sequence
  synthetic construct
gcugaacaacaugucauuuagcagccgaaaggcugc

SEQ ID NO: 937 - RNA, 36 nt, Artificial Sequence
  synthetic construct
cugaacaacaugucauuugagcagccgaaaggcugc

SEQ ID NO: 938 - RNA, 36 nt, Artificial Sequence
  synthetic construct
cagcagcugaacaacauguagcagccgaaaggcugc

SEQ ID NO: 939 - RNA, 36 nt, Artificial Sequence
  synthetic construct
uuuaacuuccagaaauaaaagcagccgaaaggcugc

SEQ ID NO: 940 - RNA, 36 nt, Artificial Sequence
  synthetic construct
agcagcugaacaacaugucagcagccgaaaggcugc

SEQ ID NO: 941 - RNA, 36 nt, Artificial Sequence
  synthetic construct
uugaugcaguuuggaaauaagcagccgaaaggcugc

SEQ ID NO: 942 - RNA, 36 nt, Artificial Sequence
  synthetic construct
ugaacaacaugucauuugcagcagccgaaaggcugc

SEQ ID NO: 943 - RNA, 36 nt, Artificial Sequence
  synthetic construct
uaguguaaaaauuuauauuagcagccgaaaggcugc

SEQ ID NO: 944 - RNA, 36 nt, Artificial Sequence
  synthetic construct
uaacuuugugguuccagauagcagccgaaaggcugc

SEQ ID NO: 945 - RNA, 36 nt, Artificial Sequence
  synthetic construct
aagcagcagcugaacaacaagcagccgaaaggcugc

SEQ ID NO: 946 - RNA, 36 nt, Artificial Sequence
  synthetic construct
caaaagugaugaacauggaagcagccgaaaggcugc

SEQ ID NO: 947 - RNA, 22 nt, Artificial Sequence
  synthetic construct
ugaaaucaaagucauccugggg

SEQ ID NO: 948 - RNA, 22 nt, Artificial Sequence
  synthetic construct
uugaaaucaaagucauccuggg

SEQ ID NO: 949 - RNA, 22 nt, Artificial Sequence
  synthetic construct
uuugaaaucaaagucauccugg

SEQ ID NO: 950 - RNA, 22 nt, Artificial Sequence
  synthetic construct
uuaguugaaaucaaagucaugg

SEQ ID NO: 951 - RNA, 22 nt, Artificial Sequence
  synthetic construct
uagauuaugaaacaccaaaggg

SEQ ID NO: 952 - RNA, 22 nt, Artificial Sequence
  synthetic construct
uauaguugaaaucaaagucagg

SEQ ID NO: 953 - RNA, 22 nt, Artificial Sequence
  synthetic construct
uuauaguugaaaucaaagucgg

SEQ ID NO: 954 - RNA, 22 nt, Artificial Sequence
  synthetic construct
uuuguuuccauucagaucuugg

SEQ ID NO: 955 - RNA, 22 nt, Artificial Sequence
  synthetic construct
uaugacguuauccaguuuucgg

SEQ ID NO: 956 - RNA, 22 nt, Artificial Sequence
  synthetic construct
uugcuaaugacguuauccaggg

SEQ ID NO: 957 - RNA, 22 nt, Artificial Sequence
  synthetic construct
uucauuaaguuucuaaacaggg

SEQ ID NO: 958 - RNA, 22 nt, Artificial Sequence
  synthetic construct
ucacuuuucauuaaguuucugg

SEQ ID NO: 959 - RNA, 22 nt, Artificial Sequence
  synthetic construct
uucaacucagggaauuugacgg

SEQ ID NO: 960 - RNA, 22 nt, Artificial Sequence
  synthetic construct
uauaauucaacucagggaaugg

SEQ ID NO: 961 - RNA, 22 nt, Artificial Sequence
  synthetic construct
uaagcugauaauucaacucagg

SEQ ID NO: 962 - RNA, 22 nt, Artificial Sequence
  synthetic construct
uuaagcugauaauucaacucgg

SEQ ID NO: 963 - RNA, 22 nt, Artificial Sequence
  synthetic construct
uuuaagcugauaauucaacugg

SEQ ID NO: 964 - RNA, 22 nt, Artificial Sequence
  synthetic construct
uauuuuaagcugauaauucagg

SEQ ID NO: 965 - RNA, 22 nt, Artificial Sequence
  synthetic construct
uuaauuuuaagcugauaauugg

SEQ ID NO: 966 - RNA, 22 nt, Artificial Sequence
  synthetic construct
uuuaauuuuaagcugauaaugg

SEQ ID NO: 967 - RNA, 22 nt, Artificial Sequence
  synthetic construct
uacacuuuaauuuuaagcuggg

SEQ ID NO: 968 - RNA, 22 nt, Artificial Sequence
  synthetic construct
ucacacuuuaauuuuaagcugg

SEQ ID NO: 969 - RNA, 22 nt, Artificial Sequence
  synthetic construct
uacacccugaauaauucacagg

SEQ ID NO: 970 - RNA, 22 nt, Artificial Sequence
  synthetic construct
uacaaggucaaugauauugugg

SEQ ID NO: 971 - RNA, 22 nt, Artificial Sequence
  synthetic construct
uucacaaggucaaugauauugg

SEQ ID NO: 972 - RNA, 22 nt, Artificial Sequence
  synthetic construct
uuuuucacaaggucaaugaugg

SEQ ID NO: 973 - RNA, 22 nt, Artificial Sequence
  synthetic construct
uaugauuucagcaaaugacagg

SEQ ID NO: 974 - RNA, 22 nt, Artificial Sequence
  synthetic construct
uagauaaacuuggucuucaggg

SEQ ID NO: 975 - RNA, 22 nt, Artificial Sequence
  synthetic construct
uugucacacagauaaacuuggg

SEQ ID NO: 976 - RNA, 22 nt, Artificial Sequence
  synthetic construct
uucaccauuauuuccaaacugg

SEQ ID NO: 977 - RNA, 22 nt, Artificial Sequence
  synthetic construct
uuucacucauuucucuauuugg

SEQ ID NO: 978 - RNA, 22 nt, Artificial Sequence
  synthetic construct
uauucacucauuucucuauugg

SEQ ID NO: 979 - RNA, 22 nt, Artificial Sequence
  synthetic construct
uaaaaaaucuggaaccacaagg

SEQ ID NO: 980 - RNA, 22 nt, Artificial Sequence
  synthetic construct
uaaaaaucuggaaccacaaagg

SEQ ID NO: 981 - RNA, 22 nt, Artificial Sequence
  synthetic construct
uuccaaacugcaucaaugaagg

SEQ ID NO: 982 - RNA, 22 nt, Artificial Sequence
  synthetic construct
uuuauuuccaaacugcaucagg

SEQ ID NO: 983 - RNA, 22 nt, Artificial Sequence
  synthetic construct
uauuucagcaaaugacaugugg

SEQ ID NO: 984 - RNA, 22 nt, Artificial Sequence
  synthetic construct
uaaaaucuggaaccacaaaggg

SEQ ID NO: 985 - RNA, 22 nt, Artificial Sequence
  synthetic construct
uacaauaauauaaauuuuuagg

SEQ ID NO: 986 - RNA, 22 nt, Artificial Sequence
  synthetic construct
uuuccaaacugcaucaaugagg

SEQ ID NO: 987 - RNA, 22 nt, Artificial Sequence
  synthetic construct
uccaugaugauuucagcaaagg

SEQ ID NO: 988 - RNA, 22 nt, Artificial Sequence
  synthetic construct
uagcaaaugacauguuguucgg

SEQ ID NO: 989 - RNA, 22 nt, Artificial Sequence
  synthetic construct
uucagcaaaugacauguugugg

SEQ ID NO: 990 - RNA, 22 nt, Artificial Sequence
  synthetic construct
ucagcaaaugacauguuguugg

SEQ ID NO: 991 - RNA, 22 nt, Artificial Sequence
  synthetic construct
ugaaacugcuugauucuucggg

SEQ ID NO: 992 - RNA, 22 nt, Artificial Sequence
  synthetic construct
uaucaccacaacuggcaagggg

SEQ ID NO: 993 - RNA, 22 nt, Artificial Sequence
  synthetic construct
uuccaguuucuuaauuuguugg

SEQ ID NO: 994 - RNA, 22 nt, Artificial Sequence
  synthetic construct
uacugguuguuuccauucaggg

SEQ ID NO: 995 - RNA, 22 nt, Artificial Sequence
  synthetic construct
uuccauuggcuucucaagaugg

SEQ ID NO: 996 - RNA, 22 nt, Artificial Sequence
  synthetic construct
uagaaacugcuugauucuucgg

SEQ ID NO: 997 - RNA, 22 nt, Artificial Sequence
  synthetic construct
uagaucaccacaacuggcaagg

SEQ ID NO: 998 - RNA, 22 nt, Artificial Sequence
  synthetic construct
uugguuguuuccauucagaugg

SEQ ID NO: 999 - RNA, 22 nt, Artificial Sequence
  synthetic construct
uuucauuuucuguucuagaugg

SEQ ID NO: 1000 - RNA, 22 nt, Artificial Sequence
  synthetic construct
uauuuucuguucuagauccugg

SEQ ID NO: 1001 - RNA, 22 nt, Artificial Sequence
  synthetic construct
ucacaauaauauaaauuuuugg

SEQ ID NO: 1002 - RNA, 22 nt, Artificial Sequence
  synthetic construct
uauaauauaaauuuuuacacgg

SEQ ID NO: 1003 - RNA, 22 nt, Artificial Sequence
  synthetic construct
ugaaacuuuuugcugcaacugg

SEQ ID NO: 1004 - RNA, 22 nt, Artificial Sequence
  synthetic construct
uuaaaaaaguuuacauucuugg

SEQ ID NO: 1005 - RNA, 22 nt, Artificial Sequence
  synthetic construct
uagaacauucgacucuugcagg

SEQ ID NO: 1006 - RNA, 22 nt, Artificial Sequence
  synthetic construct
uaaacugcaucaaugaaucugg

SEQ ID NO: 1007 - RNA, 22 nt, Artificial Sequence
  synthetic construct
uaaacuuuuugcugcaacucgg

SEQ ID NO: 1008 - RNA, 22 nt, Artificial Sequence
  synthetic construct
ucugauagagaacauucgacgg

SEQ ID NO: 1009 - RNA, 22 nt, Artificial Sequence
  synthetic construct
uaaaaguuuacauucuuggggg

SEQ ID NO: 1010 - RNA, 22 nt, Artificial Sequence
  synthetic construct
uauucuuccauguucaucacgg

SEQ ID NO: 1011 - RNA, 22 nt, Artificial Sequence
  synthetic construct
uuagagaacauucgacucuugg

SEQ ID NO: 1012 - RNA, 22 nt, Artificial Sequence
  synthetic construct
ucaaacugcaucaaugaaucgg

SEQ ID NO: 1013 - RNA, 22 nt, Artificial Sequence
  synthetic construct
uauagagaacauucgacucugg

SEQ ID NO: 1014 - RNA, 22 nt, Artificial Sequence
  synthetic construct
uugauagagaacauucgacugg

SEQ ID NO: 1015 - RNA, 22 nt, Artificial Sequence
  synthetic construct
uccugaauaauucacaccaggg

SEQ ID NO: 1016 - RNA, 22 nt, Artificial Sequence
  synthetic construct
uaacauucgacucuugcagggg

SEQ ID NO: 1017 - RNA, 22 nt, Artificial Sequence
  synthetic construct
uugaaucuuagcaggaaggugg

SEQ ID NO: 1018 - RNA, 22 nt, Artificial Sequence
  synthetic construct
uugaauaauucacaccaggugg

SEQ ID NO: 1019 - RNA, 22 nt, Artificial Sequence
  synthetic construct
uguaaaaaaguuuacauucugg

SEQ ID NO: 1020 - RNA, 22 nt, Artificial Sequence
  synthetic construct
uugacuuuaguagugaacuggg

SEQ ID NO: 1021 - RNA, 22 nt, Artificial Sequence
  synthetic construct
uaaaaaaguuuacauucuuggg

SEQ ID NO: 1022 - RNA, 22 nt, Artificial Sequence
  synthetic construct
ugaacauucgacucuugcaggg

SEQ ID NO: 1023 - RNA, 22 nt, Artificial Sequence
  synthetic construct
uacccugaauaauucacaccgg

SEQ ID NO: 1024 - RNA, 22 nt, Artificial Sequence
  synthetic construct
uaaaaaguuuacauucuugggg

SEQ ID NO: 1025 - RNA, 22 nt, Artificial Sequence
  synthetic construct
uauguuguucagcugcugcugg

SEQ ID NO: 1026 - RNA, 22 nt, Artificial Sequence
  synthetic construct
uaaaugacauguuguucagcgg

SEQ ID NO: 1027 - RNA, 22 nt, Artificial Sequence
  synthetic construct
ucaaaugacauguuguucaggg

SEQ ID NO: 1028 - RNA, 22 nt, Artificial Sequence
  synthetic construct
uacauguuguucagcugcuggg

SEQ ID NO: 1029 - RNA, 22 nt, Artificial Sequence
  synthetic construct
uuuuauuucuggaaguuaaagg

SEQ ID NO: 1030 - RNA, 22 nt, Artificial Sequence
  synthetic construct
ugacauguuguucagcugcugg

SEQ ID NO: 1031 - RNA, 22 nt, Artificial Sequence
  synthetic construct
uuauuuccaaacugcaucaagg

SEQ ID NO: 1032 - RNA, 22 nt, Artificial Sequence
  synthetic construct
ugcaaaugacauguuguucagg

SEQ ID NO: 1033 - RNA, 22 nt, Artificial Sequence
  synthetic construct
uaauauaaauuuuuacacuagg

SEQ ID NO: 1034 - RNA, 22 nt, Artificial Sequence
  synthetic construct
uaucuggaaccacaaaguuagg

SEQ ID NO: 1035 - RNA, 22 nt, Artificial Sequence
  synthetic construct
uuguuguucagcugcugcuugg

SEQ ID NO: 1036 - RNA, 22 nt, Artificial Sequence
  synthetic construct
uuccauguucaucacuuuuggg

SEQ ID NO: 1037 - RNA, 36 nt, Artificial Sequence; identical to SEQ ID NO: 857
  synthetic construct
  misc_feature (1)..(2): linked via phosphorothioate
  modified_base (1)..(1): 2'-O-methyl modified
  modified_base (2)..(2): 2'-O-methyl modified
  modified_base (3)..(3): 2'-O-methyl modified
  modified_base (4)..(4): 2'-O-methyl modified
  modified_base (5)..(5): 2'-O-methyl modified
  modified_base (6)..(6): 2'-O-methyl modified
  modified_base (7)..(7): 2'-O-methyl modified
  modified_base (8)..(8): 2'-fluoro modified
  modified_base (9)..(9): 2'-fluoro modified
  modified_base (10)..(10): 2'-fluoro modified
  modified_base (11)..(11): 2'-fluoro modified
  modified_base (12)..(12): 2'-O-methyl modified
  modified_base (13)..(13): 2'-O-methyl modified
  modified_base (14)..(14): 2'-O-methyl modified
  modified_base (15)..(15): 2'-O-methyl modified
  modified_base (16)..(16): 2'-O-methyl modified
  modified_base (17)..(17): 2'-O-methyl modified
  modified_base (18)..(18): 2'-O-methyl modified
  modified_base (19)..(19): 2'-O-methyl modified
  modified_base (20)..(20): 2'-O-methyl modified
  modified_base (21)..(21): 2'-O-methyl modified
  modified_base (22)..(22): 2'-O-methyl modified
  modified_base (23)..(23): 2'-O-methyl modified
  modified_base (24)..(24): 2'-O-methyl modified
  modified_base (25)..(25): 2'-O-methyl modified
  modified_base (26)..(26): 2'-O-methyl modified
  modified_base (27)..(27): 2'-O-methyl modified
  modified_base (28)..(28): GalNAc-conjugated
  modified_base (29)..(29): GalNAc-conjugated
  modified_base (30)..(30): GalNAc-conjugated
  modified_base (31)..(31): 2'-O-methyl modified
  modified_base (32)..(32): 2'-O-methyl modified
  modified_base (33)..(33): 2'-O-methyl modified
  modified_base (34)..(34): 2'-O-methyl modified
  modified_base (35)..(35): 2'-O-methyl modified
  modified_base (36)..(36): 2'-O-methyl modified

SEQ ID NO: 1038 - RNA, 36 nt, Artificial Sequence; identical to SEQ ID NO: 858
  synthetic construct
  misc_feature (1)..(2): linked via phosphorothioate
  modified_base (1)..(1): 2'-O-methyl modified
  modified_base (2)..(2): 2'-O-methyl modified
  modified_base (3)..(3): 2'-O-methyl modified
  modified_base (4)..(4): 2'-O-methyl modified
  modified_base (5)..(5): 2'-O-methyl modified
  modified_base (6)..(6): 2'-O-methyl modified
  modified_base (7)..(7): 2'-O-methyl modified
  modified_base (8)..(8): 2'-fluoro modified
  modified_base (9)..(9): 2'-fluoro modified
  modified_base (10)..(10): 2'-fluoro modified
  modified_base (11)..(11): 2'-fluoro modified
  modified_base (12)..(12): 2'-O-methyl modified
  modified_base (13)..(13): 2'-O-methyl modified
  modified_base (14)..(14): 2'-O-methyl modified
  modified_base (15)..(15): 2'-O-methyl modified
  modified_base (16)..(16): 2'-O-methyl modified
  modified_base (17)..(17): 2'-O-methyl modified
  modified_base (18)..(18): 2'-O-methyl modified
  modified_base (19)..(19): 2'-O-methyl modified
  modified_base (20)..(20): 2'-O-methyl modified
  modified_base (21)..(21): 2'-O-methyl modified
  modified_base (22)..(22): 2'-O-methyl modified
  modified_base (23)..(23): 2'-O-methyl modified
  modified_base (24)..(24): 2'-O-methyl modified
  modified_base (25)..(25): 2'-O-methyl modified
  modified_base (26)..(26): 2'-O-methyl modified
  modified_base (27)..(27): 2'-O-methyl modified
  modified_base (28)..(28): GalNAc-conjugated
  modified_base (29)..(29): GalNAc-conjugated
  modified_base (30)..(30): GalNAc-conjugated
  modified_base (31)..(31): 2'-O-methyl modified
  modified_base (32)..(32): 2'-O-methyl modified
  modified_base (33)..(33): 2'-O-methyl modified
  modified_base (34)..(34): 2'-O-methyl modified
  modified_base (35)..(35): 2'-O-methyl modified
  modified_base (36)..(36): 2'-O-methyl modified

SEQ ID NO: 1039 - RNA, 36 nt, Artificial Sequence; identical to SEQ ID NO: 859
  synthetic construct
  misc_feature (1)..(2): linked via phosphorothioate
  modified_base (1)..(1): 2'-O-methyl modified
  modified_base (2)..(2): 2'-O-methyl modified
  modified_base (3)..(3): 2'-O-methyl modified
  modified_base (4)..(4): 2'-O-methyl modified
  modified_base (5)..(5): 2'-O-methyl modified
  modified_base (6)..(6): 2'-O-methyl modified
  modified_base (7)..(7): 2'-O-methyl modified
  modified_base (8)..(8): 2'-fluoro modified
  modified_base (9)..(9): 2'-fluoro modified
  modified_base (10)..(10): 2'-fluoro modified
  modified_base (11)..(11): 2'-fluoro modified
  modified_base (12)..(12): 2'-O-methyl modified
  modified_base (13)..(13): 2'-O-methyl modified
  modified_base (14)..(14): 2'-O-methyl modified
  modified_base (15)..(15): 2'-O-methyl modified
  modified_base (16)..(16): 2'-O-methyl modified
  modified_base (17)..(17): 2'-O-methyl modified
  modified_base (18)..(18): 2'-O-methyl modified
  modified_base (19)..(19): 2'-O-methyl modified
  modified_base (20)..(20): 2'-O-methyl modified
  modified_base (21)..(21): 2'-O-methyl modified
  modified_base (22)..(22): 2'-O-methyl modified
  modified_base (23)..(23): 2'-O-methyl modified
  modified_base (24)..(24): 2'-O-methyl modified
  modified_base (25)..(25): 2'-O-methyl modified
  modified_base (26)..(26): 2'-O-methyl modified
  modified_base (27)..(27): 2'-O-methyl modified
  modified_base (28)..(28): GalNAc-conjugated
  modified_base (29)..(29): GalNAc-conjugated
  modified_base (30)..(30): GalNAc-conjugated
  modified_base (31)..(31): 2'-O-methyl modified
  modified_base (32)..(32): 2'-O-methyl modified
  modified_base (33)..(33): 2'-O-methyl modified
  modified_base (34)..(34): 2'-O-methyl modified
  modified_base (35)..(35): 2'-O-methyl modified
  modified_base (36)..(36): 2'-O-methyl modified

SEQ ID NO: 1040 - RNA, 36 nt, Artificial Sequence; identical to SEQ ID NO: 860
  synthetic construct
  misc_feature (1)..(2): linked via phosphorothioate
  modified_base (1)..(1): 2'-O-methyl modified
  modified_base (2)..(2): 2'-O-methyl modified
  modified_base (3)..(3): 2'-O-methyl modified
  modified_base (4)..(4): 2'-O-methyl modified
  modified_base (5)..(5): 2'-O-methyl modified
  modified_base (6)..(6): 2'-O-methyl modified
  modified_base (7)..(7): 2'-O-methyl modified
  modified_base (8)..(8): 2'-fluoro modified
  modified_base (9)..(9): 2'-fluoro modified
  modified_base (10)..(10): 2'-fluoro modified
  modified_base (11)..(11): 2'-fluoro modified
  modified_base (12)..(12): 2'-O-methyl modified
  modified_base (13)..(13): 2'-O-methyl modified
  modified_base (14)..(14): 2'-O-methyl modified
  modified_base (15)..(15): 2'-O-methyl modified
  modified_base (16)..(16): 2'-O-methyl modified
  modified_base (17)..(17): 2'-O-methyl modified
  modified_base (18)..(18): 2'-O-methyl modified
  modified_base (19)..(19): 2'-O-methyl modified
  modified_base (20)..(20): 2'-O-methyl modified
  modified_base (21)..(21): 2'-O-methyl modified
  modified_base (22)..(22): 2'-O-methyl modified
  modified_base (23)..(23): 2'-O-methyl modified
  modified_base (24)..(24): 2'-O-methyl modified
  modified_base (25)..(25): 2'-O-methyl modified
  modified_base (26)..(26): 2'-O-methyl modified
  modified_base (27)..(27): 2'-O-methyl modified
  modified_base (28)..(28): GalNAc-conjugated
  modified_base (29)..(29): GalNAc-conjugated
  modified_base (30)..(30): GalNAc-conjugated
  modified_base (31)..(31): 2'-O-methyl modified
  modified_base (32)..(32): 2'-O-methyl modified
  modified_base (33)..(33): 2'-O-methyl modified
  modified_base (34)..(34): 2'-O-methyl modified
  modified_base (35)..(35): 2'-O-methyl modified
  modified_base (36)..(36): 2'-O-methyl modified

SEQ ID NO: 1041 - RNA, 36 nt, Artificial Sequence; identical to SEQ ID NO: 861
  synthetic construct
  misc_feature (1)..(2): linked via phosphorothioate
  modified_base (1)..(1): 2'-O-methyl modified
  modified_base (2)..(2): 2'-O-methyl modified
  modified_base (3)..(3): 2'-O-methyl modified
  modified_base (4)..(4): 2'-O-methyl modified
  modified_base (5)..(5): 2'-O-methyl modified
  modified_base (6)..(6): 2'-O-methyl modified
  modified_base (7)..(7): 2'-O-methyl modified
  modified_base (8)..(8): 2'-fluoro modified
  modified_base (9)..(9): 2'-fluoro modified
  modified_base (10)..(10): 2'-fluoro modified
  modified_base (11)..(11): 2'-fluoro modified
  modified_base (12)..(12): 2'-O-methyl modified
  modified_base (13)..(13): 2'-O-methyl modified
  modified_base (14)..(14): 2'-O-methyl modified
  modified_base (15)..(15): 2'-O-methyl modified
  modified_base (16)..(16): 2'-O-methyl modified
  modified_base (17)..(17): 2'-O-methyl modified
  modified_base (18)..(18): 2'-O-methyl modified
  modified_base (19)..(19): 2'-O-methyl modified
  modified_base (20)..(20): 2'-O-methyl modified
  modified_base (21)..(21): 2'-O-methyl modified
  modified_base (22)..(22): 2'-O-methyl modified
  modified_base (23)..(23): 2'-O-methyl modified
  modified_base (24)..(24): 2'-O-methyl modified
  modified_base (25)..(25): 2'-O-methyl modified
  modified_base (26)..(26): 2'-O-methyl modified
  modified_base (27)..(27): 2'-O-methyl modified
  modified_base (28)..(28): GalNAc-conjugated
  modified_base (29)..(29): GalNAc-conjugated
  modified_base (30)..(30): GalNAc-conjugated
  modified_base (31)..(31): 2'-O-methyl modified
  modified_base (32)..(32): 2'-O-methyl modified
  modified_base (33)..(33): 2'-O-methyl modified
  modified_base (34)..(34): 2'-O-methyl modified
  modified_base (35)..(35): 2'-O-methyl modified
  modified_base (36)..(36): 2'-O-methyl modified

SEQ ID NO: 1042 - RNA, 36 nt, Artificial Sequence; identical to SEQ ID NO: 862
  synthetic construct
  misc_feature (1)..(2): linked via phosphorothioate
  modified_base (1)..(1): 2'-O-methyl modified
  modified_base (2)..(2): 2'-O-methyl modified
  modified_base (3)..(3): 2'-O-methyl modified
  modified_base (4)..(4): 2'-O-methyl modified
  modified_base (5)..(5): 2'-O-methyl modified
  modified_base (6)..(6): 2'-O-methyl modified
  modified_base (7)..(7): 2'-O-methyl modified
  modified_base (8)..(8): 2'-fluoro modified
  modified_base (9)..(9): 2'-fluoro modified
  modified_base (10)..(10): 2'-fluoro modified
  modified_base (11)..(11): 2'-fluoro modified
  modified_base (12)..(12): 2'-O-methyl modified
  modified_base (13)..(13): 2'-O-methyl modified
  modified_base (14)..(14): 2'-O-methyl modified
  modified_base (15)..(15): 2'-O-methyl modified
  modified_base (16)..(16): 2'-O-methyl modified
  modified_base (17)..(17): 2'-O-methyl modified
  modified_base (18)..(18): 2'-O-methyl modified
  modified_base (19)..(19): 2'-O-methyl modified
  modified_base (20)..(20): 2'-O-methyl modified
  modified_base (21)..(21): 2'-O-methyl modified
  modified_base (22)..(22): 2'-O-methyl modified
  modified_base (23)..(23): 2'-O-methyl modified
  modified_base (24)..(24): 2'-O-methyl modified
  modified_base (25)..(25): 2'-O-methyl modified
  modified_base (26)..(26): 2'-O-methyl modified
  modified_base (27)..(27): 2'-O-methyl modified
  modified_base (28)..(28): GalNAc-conjugated
  modified_base (29)..(29): GalNAc-conjugated
  modified_base (30)..(30): GalNAc-conjugated
  modified_base (31)..(31): 2'-O-methyl modified
  modified_base (32)..(32): 2'-O-methyl modified
  modified_base (33)..(33): 2'-O-methyl modified
  modified_base (34)..(34): 2'-O-methyl modified
  modified_base (35)..(35): 2'-O-methyl modified
  modified_base (36)..(36): 2'-O-methyl modified

SEQ ID NO: 1043 - RNA, 36 nt, Artificial Sequence; identical to SEQ ID NO: 863
  synthetic construct
  misc_feature (1)..(2): linked via phosphorothioate
  modified_base (1)..(1): 2'-O-methyl modified
  modified_base (2)..(2): 2'-O-methyl modified
  modified_base (3)..(3): 2'-O-methyl modified
  modified_base (4)..(4): 2'-O-methyl modified
  modified_base (5)..(5): 2'-O-methyl modified
  modified_base (6)..(6): 2'-O-methyl modified
  modified_base (7)..(7): 2'-O-methyl modified
  modified_base (8)..(8): 2'-fluoro modified
  modified_base (9)..(9): 2'-fluoro modified
  modified_base (10)..(10): 2'-fluoro modified
  modified_base (11)..(11): 2'-fluoro modified
  modified_base (12)..(12): 2'-O-methyl modified
  modified_base (13)..(13): 2'-O-methyl modified
  modified_base (14)..(14): 2'-O-methyl modified
  modified_base (15)..(15): 2'-O-methyl modified
  modified_base (16)..(16): 2'-O-methyl modified
  modified_base (17)..(17): 2'-O-methyl modified
  modified_base (18)..(18): 2'-O-methyl modified
  modified_base (19)..(19): 2'-O-methyl modified
  modified_base (20)..(20): 2'-O-methyl modified
  modified_base (21)..(21): 2'-O-methyl modified
  modified_base (22)..(22): 2'-O-methyl modified
  modified_base (23)..(23): 2'-O-methyl modified
  modified_base (24)..(24): 2'-O-methyl modified
  modified_base (25)..(25): 2'-O-methyl modified
  modified_base (26)..(26): 2'-O-methyl modified
  modified_base (27)..(27): 2'-O-methyl modified
  modified_base (28)..(28): GalNAc-conjugated
  modified_base (29)..(29): GalNAc-conjugated
  modified_base (30)..(30): GalNAc-conjugated
  modified_base (31)..(31): 2'-O-methyl modified
  modified_base (32)..(32): 2'-O-methyl modified
  modified_base (33)..(33): 2'-O-methyl modified
  modified_base (34)..(34): 2'-O-methyl modified
  modified_base (35)..(35): 2'-O-methyl modified
  modified_base (36)..(36): 2'-O-methyl modified

SEQ ID NO: 1044 - RNA, 36 nt, Artificial Sequence; identical to SEQ ID NO: 864
  synthetic construct
  misc_feature (1)..(2): linked via phosphorothioate
  modified_base (1)..(1): 2'-O-methyl modified
  modified_base (2)..(2): 2'-O-methyl modified
  modified_base (3)..(3): 2'-O-methyl modified
  modified_base (4)..(4): 2'-O-methyl modified
  modified_base (5)..(5): 2'-O-methyl modified
  modified_base (6)..(6): 2'-O-methyl modified
  modified_base (7)..(7): 2'-O-methyl modified
  modified_base (8)..(8): 2'-fluoro modified
  modified_base (9)..(9): 2'-fluoro modified
  modified_base (10)..(10): 2'-fluoro modified
  modified_base (11)..(11): 2'-fluoro modified
  modified_base (12)..(12): 2'-O-methyl modified
  modified_base (13)..(13): 2'-O-methyl modified
  modified_base (14)..(14): 2'-O-methyl modified
  modified_base (15)..(15): 2'-O-methyl modified
  modified_base (16)..(16): 2'-O-methyl modified
  modified_base (17)..(17): 2'-O-methyl modified
  modified_base (18)..(18): 2'-O-methyl modified
  modified_base (19)..(19): 2'-O-methyl modified
  modified_base (20)..(20): 2'-O-methyl modified
  modified_base (21)..(21): 2'-O-methyl modified
  modified_base (22)..(22): 2'-O-methyl modified
  modified_base (23)..(23): 2'-O-methyl modified
  modified_base (24)..(24): 2'-O-methyl modified
  modified_base (25)..(25): 2'-O-methyl modified
  modified_base (26)..(26): 2'-O-methyl modified
  modified_base (27)..(27): 2'-O-methyl modified
  modified_base (28)..(28): GalNAc-conjugated
  modified_base (29)..(29): GalNAc-conjugated
  modified_base (30)..(30): GalNAc-conjugated
  modified_base (31)..(31): 2'-O-methyl modified
  modified_base (32)..(32): 2'-O-methyl modified
  modified_base (33)..(33): 2'-O-methyl modified
  modified_base (34)..(34): 2'-O-methyl modified
  modified_base (35)..(35): 2'-O-methyl modified
  modified_base (36)..(36): 2'-O-methyl modified

SEQ ID NO: 1045 - RNA, 36 nt, Artificial Sequence; identical to SEQ ID NO: 865
  synthetic construct
  misc_feature (1)..(2): linked via phosphorothioate
  modified_base (1)..(1): 2'-O-methyl modified
  modified_base (2)..(2): 2'-O-methyl modified
  modified_base (3)..(3): 2'-O-methyl modified
  modified_base (4)..(4): 2'-O-methyl modified
  modified_base (5)..(5): 2'-O-methyl modified
  modified_base (6)..(6): 2'-O-methyl modified
  modified_base (7)..(7): 2'-O-methyl modified
  modified_base (8)..(8): 2'-fluoro modified
  modified_base (9)..(9): 2'-fluoro modified
  modified_base (10)..(10): 2'-fluoro modified
  modified_base (11)..(11): 2'-fluoro modified
  modified_base (12)..(12): 2'-O-methyl modified
  modified_base (13)..(13): 2'-O-methyl modified
  modified_base (14)..(14): 2'-O-methyl modified
  modified_base (15)..(15): 2'-O-methyl modified
  modified_base (16)..(16): 2'-O-methyl modified
  modified_base (17)..(17): 2'-O-methyl modified
  modified_base (18)..(18): 2'-O-methyl modified
  modified_base (19)..(19): 2'-O-methyl modified
  modified_base (20)..(20): 2'-O-methyl modified
  modified_base (21)..(21): 2'-O-methyl modified
  modified_base (22)..(22): 2'-O-methyl modified
  modified_base (23)..(23): 2'-O-methyl modified
  modified_base (24)..(24): 2'-O-methyl modified
  modified_base (25)..(25): 2'-O-methyl modified
  modified_base (26)..(26): 2'-O-methyl modified
  modified_base (27)..(27): 2'-O-methyl modified
  modified_base (28)..(28): GalNAc-conjugated
  modified_base (29)..(29): GalNAc-conjugated
  modified_base (30)..(30): GalNAc-conjugated
  modified_base (31)..(31): 2'-O-methyl modified
  modified_base (32)..(32): 2'-O-methyl modified
  modified_base (33)..(33): 2'-O-methyl modified
  modified_base (34)..(34): 2'-O-methyl modified
  modified_base (35)..(35): 2'-O-methyl modified
  modified_base (36)..(36): 2'-O-methyl modified

SEQ ID NO: 1046 - RNA, 36 nt, Artificial Sequence; identical to SEQ ID NO: 866
  synthetic construct
  misc_feature (1)..(2): linked via phosphorothioate
  modified_base (1)..(1): 2'-O-methyl modified
  modified_base (2)..(2): 2'-O-methyl modified
  modified_base (3)..(3): 2'-O-methyl modified
  modified_base (4)..(4): 2'-O-methyl modified
  modified_base (5)..(5): 2'-O-methyl modified
  modified_base (6)..(6): 2'-O-methyl modified
  modified_base (7)..(7): 2'-O-methyl modified
  modified_base (8)..(8): 2'-fluoro modified
  modified_base (9)..(9): 2'-fluoro modified
  modified_base (10)..(10): 2'-fluoro modified
  modified_base (11)..(11): 2'-fluoro modified
  modified_base (12)..(12): 2'-O-methyl modified
  modified_base (13)..(13): 2'-O-methyl modified
  modified_base (14)..(14): 2'-O-methyl modified
  modified_base (15)..(15): 2'-O-methyl modified
  modified_base (16)..(16): 2'-O-methyl modified
  modified_base (17)..(17): 2'-O-methyl modified
  modified_base (18)..(18): 2'-O-methyl modified
  modified_base (19)..(19): 2'-O-methyl modified
  modified_base (20)..(20): 2'-O-methyl modified
  modified_base (21)..(21): 2'-O-methyl modified
  modified_base (22)..(22): 2'-O-methyl modified
  modified_base (23)..(23): 2'-O-methyl modified
  modified_base (24)..(24): 2'-O-methyl modified
  modified_base (25)..(25): 2'-O-methyl modified
  modified_base (26)..(26): 2'-O-methyl modified
  modified_base (27)..(27): 2'-O-methyl modified
  modified_base (28)..(28): GalNAc-conjugated
  modified_base (29)..(29): GalNAc-conjugated
  modified_base (30)..(30): GalNAc-conjugated
  modified_base (31)..(31): 2'-O-methyl modified
  modified_base (32)..(32): 2'-O-methyl modified
  modified_base (33)..(33): 2'-O-methyl modified
  modified_base (34)..(34): 2'-O-methyl modified
  modified_base (35)..(35): 2'-O-methyl modified
  modified_base (36)..(36): 2'-O-methyl modified

SEQ ID NO: 1047 - RNA, 36 nt, Artificial Sequence; identical to SEQ ID NO: 867
  synthetic construct
  misc_feature (1)..(2): linked via phosphorothioate
  modified_base (1)..(1): 2'-O-methyl modified
  modified_base (2)..(2): 2'-O-methyl modified
  modified_base (3)..(3): 2'-O-methyl modified
  modified_base (4)..(4): 2'-O-methyl modified
  modified_base (5)..(5): 2'-O-methyl modified
  modified_base (6)..(6): 2'-O-methyl modified
  modified_base (7)..(7): 2'-O-methyl modified
  modified_base (8)..(8): 2'-fluoro modified
  modified_base (9)..(9): 2'-fluoro modified
  modified_base (10)..(10): 2'-fluoro modified
  modified_base (11)..(11): 2'-fluoro modified
  modified_base (12)..(12): 2'-O-methyl modified
  modified_base (13)..(13): 2'-O-methyl modified
  modified_base (14)..(14): 2'-O-methyl modified
  modified_base (15)..(15): 2'-O-methyl modified
  modified_base (16)..(16): 2'-O-methyl modified
  modified_base (17)..(17): 2'-O-methyl modified
  modified_base (18)..(18): 2'-O-methyl modified
  modified_base (19)..(19): 2'-O-methyl modified
  modified_base (20)..(20): 2'-O-methyl modified
  modified_base (21)..(21): 2'-O-methyl modified
  modified_base (22)..(22): 2'-O-methyl modified
  modified_base (23)..(23): 2'-O-methyl modified
  modified_base (24)..(24): 2'-O-methyl modified
  modified_base (25)..(25): 2'-O-methyl modified
  modified_base (26)..(26): 2'-O-methyl modified
  modified_base (27)..(27): 2'-O-methyl modified
  modified_base (28)..(28): GalNAc-conjugated
  modified_base (29)..(29): GalNAc-conjugated
  modified_base (30)..(30): GalNAc-conjugated
  modified_base (31)..(31): 2'-O-methyl modified
  modified_base (32)..(32): 2'-O-methyl modified
  modified_base (33)..(33): 2'-O-methyl modified
  modified_base (34)..(34): 2'-O-methyl modified
  modified_base (35)..(35): 2'-O-methyl modified
  modified_base (36)..(36): 2'-O-methyl modified

SEQ ID NO: 1048 - RNA, 36 nt, Artificial Sequence; identical to SEQ ID NO: 868
  synthetic construct
  misc_feature (1)..(2): linked via phosphorothioate
  modified_base (1)..(1): 2'-O-methyl modified
  modified_base (2)..(2): 2'-O-methyl modified
  modified_base (3)..(3): 2'-O-methyl modified
  modified_base (4)..(4): 2'-O-methyl modified
  modified_base (5)..(5): 2'-O-methyl modified
  modified_base (6)..(6): 2'-O-methyl modified
  modified_base (7)..(7): 2'-O-methyl modified
  modified_base (8)..(8): 2'-fluoro modified
  modified_base (9)..(9): 2'-fluoro modified
  modified_base (10)..(10): 2'-fluoro modified
  modified_base (11)..(11): 2'-fluoro modified
  modified_base (12)..(12): 2'-O-methyl modified
  modified_base (13)..(13): 2'-O-methyl modified
  modified_base (14)..(14): 2'-O-methyl modified
  modified_base (15)..(15): 2'-O-methyl modified
  modified_base (16)..(16): 2'-O-methyl modified
  modified_base (17)..(17): 2'-O-methyl modified
  modified_base (18)..(18): 2'-O-methyl modified
  modified_base (19)..(19): 2'-O-methyl modified
  modified_base (20)..(20): 2'-O-methyl modified
  modified_base (21)..(21): 2'-O-methyl modified
  modified_base (22)..(22): 2'-O-methyl modified
  modified_base (23)..(23): 2'-O-methyl modified
  modified_base (24)..(24): 2'-O-methyl modified
  modified_base (25)..(25): 2'-O-methyl modified
  modified_base (26)..(26): 2'-O-methyl modified
  modified_base (27)..(27): 2'-O-methyl modified
  modified_base (28)..(28): GalNAc-conjugated
  modified_base (29)..(29): GalNAc-conjugated
  modified_base (30)..(30): GalNAc-conjugated
  modified_base (31)..(31): 2'-O-methyl modified
  modified_base (32)..(32): 2'-O-methyl modified
  modified_base (33)..(33): 2'-O-methyl modified
  modified_base (34)..(34): 2'-O-methyl modified
  modified_base (35)..(35): 2'-O-methyl modified
  modified_base (36)..(36): 2'-O-methyl modified

SEQ ID NO: 1049 - RNA, 36 nt, Artificial Sequence; identical to SEQ ID NO: 869
  synthetic construct
  misc_feature (1)..(2): linked via phosphorothioate
  modified_base (1)..(1): 2'-O-methyl modified
  modified_base (2)..(2): 2'-O-methyl modified
  modified_base (3)..(3): 2'-O-methyl modified
  modified_base (4)..(4): 2'-O-methyl modified
  modified_base (5)..(5): 2'-O-methyl modified
  modified_base (6)..(6): 2'-O-methyl modified
  modified_base (7)..(7): 2'-O-methyl modified
  modified_base (8)..(8): 2'-fluoro modified
  modified_base (9)..(9): 2'-fluoro modified
  modified_base (10)..(10): 2'-fluoro modified
  modified_base (11)..(11): 2'-fluoro modified
  modified_base (12)..(12): 2'-O-methyl modified
  modified_base (13)..(13): 2'-O-methyl modified
  modified_base (14)..(14): 2'-O-methyl modified
  modified_base (15)..(15): 2'-O-methyl modified
  modified_base (16)..(16): 2'-O-methyl modified
  modified_base (17)..(17): 2'-O-methyl modified
  modified_base (18)..(18): 2'-O-methyl modified
  modified_base (19)..(19): 2'-O-methyl modified
  modified_base (20)..(20): 2'-O-methyl modified
  modified_base (21)..(21): 2'-O-methyl modified
  modified_base (22)..(22): 2'-O-methyl modified
  modified_base (23)..(23): 2'-O-methyl modified
  modified_base (24)..(24): 2'-O-methyl modified
  modified_base (25)..(25): 2'-O-methyl modified
  modified_base (26)..(26): 2'-O-methyl modified
  modified_base (27)..(27): 2'-O-methyl modified
  modified_base (28)..(28): GalNAc-conjugated
  modified_base (29)..(29): GalNAc-conjugated
  modified_base (30)..(30): GalNAc-conjugated
  modified_base (31)..(31): 2'-O-methyl modified
  modified_base (32)..(32): 2'-O-methyl modified
  modified_base (33)..(33): 2'-O-methyl modified
  modified_base (34)..(34): 2'-O-methyl modified
  modified_base (35)..(35): 2'-O-methyl modified
  modified_base (36)..(36): 2'-O-methyl modified

SEQ ID NO: 1050 - RNA, 36 nt, Artificial Sequence; identical to SEQ ID NO: 870
  synthetic construct
  misc_feature (1)..(2): linked via phosphorothioate
  modified_base (1)..(1): 2'-O-methyl modified
  modified_base (2)..(2): 2'-O-methyl modified
  modified_base (3)..(3): 2'-O-methyl modified
  modified_base (4)..(4): 2'-O-methyl modified
  modified_base (5)..(5): 2'-O-methyl modified
  modified_base (6)..(6): 2'-O-methyl modified
  modified_base (7)..(7): 2'-O-methyl modified
  modified_base (8)..(8): 2'-fluoro modified
  modified_base (9)..(9): 2'-fluoro modified
  modified_base (10)..(10): 2'-fluoro modified
  modified_base (11)..(11): 2'-fluoro modified
  modified_base (12)..(12): 2'-O-methyl modified
  modified_base (13)..(13): 2'-O-methyl modified
  modified_base (14)..(14): 2'-O-methyl modified
  modified_base (15)..(15): 2'-O-methyl modified
  modified_base (16)..(16): 2'-O-methyl modified
  modified_base (17)..(17): 2'-O-methyl modified
  modified_base (18)..(18): 2'-O-methyl modified
  modified_base (19)..(19): 2'-O-methyl modified
  modified_base (20)..(20): 2'-O-methyl modified
  modified_base (21)..(21): 2'-O-methyl modified
  modified_base (22)..(22): 2'-O-methyl modified
  modified_base (23)..(23): 2'-O-methyl modified
  modified_base (24)..(24): 2'-O-methyl modified
  modified_base (25)..(25): 2'-O-methyl modified
  modified_base (26)..(26): 2'-O-methyl modified
  modified_base (27)..(27): 2'-O-methyl modified
  modified_base (28)..(28): GalNAc-conjugated
  modified_base (29)..(29): GalNAc-conjugated
  modified_base (30)..(30): GalNAc-conjugated
  modified_base (31)..(31): 2'-O-methyl modified
  modified_base (32)..(32): 2'-O-methyl modified
  modified_base (33)..(33): 2'-O-methyl modified
  modified_base (34)..(34): 2'-O-methyl modified
  modified_base (35)..(35): 2'-O-methyl modified
  modified_base (36)..(36): 2'-O-methyl modified

SEQ ID NO: 1051 - RNA, 36 nt, Artificial Sequence; identical to SEQ ID NO: 29
  synthetic construct
  misc_feature (1)..(2): linked via phosphorothioate
  modified_base (1)..(1): 2'-O-methyl modified
  modified_base (2)..(2): 2'-O-methyl modified
  modified_base (3)..(3): 2'-O-methyl modified
  modified_base (4)..(4): 2'-O-methyl modified
  modified_base (5)..(5): 2'-O-methyl modified
  modified_base (6)..(6): 2'-O-methyl modified
  modified_base (7)..(7): 2'-O-methyl modified
  modified_base (8)..(8): 2'-fluoro modified
  modified_base (9)..(9): 2'-fluoro modified
  modified_base (10)..(10): 2'-fluoro modified
  modified_base (11)..(11): 2'-fluoro modified
  modified_base (12)..(12): 2'-O-methyl modified
  modified_base (13)..(13): 2'-O-methyl modified
  modified_base (14)..(14): 2'-O-methyl modified
  modified_base (15)..(15): 2'-O-methyl modified
  modified_base (16)..(16): 2'-O-methyl modified
  modified_base (17)..(17): 2'-O-methyl modified
  modified_base (18)..(18): 2'-O-methyl modified
  modified_base (19)..(19): 2'-O-methyl modified
  modified_base (20)..(20): 2'-O-methyl modified
  modified_base (21)..(21): 2'-O-methyl modified
  modified_base (22)..(22): 2'-O-methyl modified
  modified_base (23)..(23): 2'-O-methyl modified
  modified_base (24)..(24): 2'-O-methyl modified
  modified_base (25)..(25): 2'-O-methyl modified
  modified_base (26)..(26): 2'-O-methyl modified
  modified_base (27)..(27): 2'-O-methyl modified
  modified_base (28)..(28): GalNAc-conjugated
  modified_base (29)..(29): GalNAc-conjugated
  modified_base (30)..(30): GalNAc-conjugated
  modified_base (31)..(31): 2'-O-methyl modified
  modified_base (32)..(32): 2'-O-methyl modified
  modified_base (33)..(33): 2'-O-methyl modified
  modified_base (34)..(34): 2'-O-methyl modified
  modified_base (35)..(35): 2'-O-methyl modified
  modified_base (36)..(36): 2'-O-methyl modified

SEQ ID NO: 1052 - RNA, 36 nt, Artificial Sequence; identical to SEQ ID NO: 33
  synthetic construct
  misc_feature (1)..(2): linked via phosphorothioate
  modified_base (1)..(1): 2'-O-methyl modified
  modified_base (2)..(2): 2'-O-methyl modified
  modified_base (3)..(3): 2'-O-methyl modified
  modified_base (4)..(4): 2'-O-methyl modified
  modified_base (5)..(5): 2'-O-methyl modified
  modified_base (6)..(6): 2'-O-methyl modified
  modified_base (7)..(7): 2'-O-methyl modified
  modified_base (8)..(8): 2'-fluoro modified
  modified_base (9)..(9): 2'-fluoro modified
  modified_base (10)..(10): 2'-fluoro modified
  modified_base (11)..(11): 2'-fluoro modified
  modified_base (12)..(12): 2'-O-methyl modified
  modified_base (13)..(13): 2'-O-methyl modified
  modified_base (14)..(14): 2'-O-methyl modified
  modified_base (15)..(15): 2'-O-methyl modified
  modified_base (16)..(16): 2'-O-methyl modified
  modified_base (17)..(17): 2'-O-methyl modified
  modified_base (18)..(18): 2'-O-methyl modified
  modified_base (19)..(19): 2'-O-methyl modified
  modified_base (20)..(20): 2'-O-methyl modified
  modified_base (21)..(21): 2'-O-methyl modified
  modified_base (22)..(22): 2'-O-methyl modified
  modified_base (23)..(23): 2'-O-methyl modified
  modified_base (24)..(24): 2'-O-methyl modified
  modified_base (25)..(25): 2'-O-methyl modified
  modified_base (26)..(26): 2'-O-methyl modified
  modified_base (27)..(27): 2'-O-methyl modified
  modified_base (28)..(28): GalNAc-conjugated
  modified_base (29)..(29): GalNAc-conjugated
  modified_base (30)..(30): GalNAc-conjugated
  modified_base (31)..(31): 2'-O-methyl modified
  modified_base (32)..(32): 2'-O-methyl modified
  modified_base (33)..(33): 2'-O-methyl modified
  modified_base (34)..(34): 2'-O-methyl modified
  modified_base (35)..(35): 2'-O-methyl modified
  modified_base (36)..(36): 2'-O-methyl modified

SEQ ID NO: 1053 - RNA, 36 nt, Artificial Sequence; identical to SEQ ID NO: 37
  synthetic construct
  misc_feature (1)..(2): linked via phosphorothioate
  modified_base (1)..(1): 2'-O-methyl modified
  modified_base (2)..(2): 2'-O-methyl modified
  modified_base (3)..(3): 2'-O-methyl modified
  modified_base (4)..(4): 2'-O-methyl modified
  modified_base (5)..(5): 2'-O-methyl modified
  modified_base (6)..(6): 2'-O-methyl modified
  modified_base (7)..(7): 2'-O-methyl modified
  modified_base (8)..(8): 2'-fluoro modified
  modified_base (9)..(9): 2'-fluoro modified
  modified_base (10)..(10): 2'-fluoro modified
  modified_base (11)..(11): 2'-fluoro modified
  modified_base (12)..(12): 2'-O-methyl modified
  modified_base (13)..(13): 2'-O-methyl modified
  modified_base (14)..(14): 2'-O-methyl modified
  modified_base (15)..(15): 2'-O-methyl modified
  modified_base (16)..(16): 2'-O-methyl modified
  modified_base (17)..(17): 2'-O-methyl modified
  modified_base (18)..(18): 2'-O-methyl modified
  modified_base (19)..(19): 2'-O-methyl modified
  modified_base (20)..(20): 2'-O-methyl modified
  modified_base (21)..(21): 2'-O-methyl modified
  modified_base (22)..(22): 2'-O-methyl modified
  modified_base (23)..(23): 2'-O-methyl modified
  modified_base (24)..(24): 2'-O-methyl modified
  modified_base (25)..(25): 2'-O-methyl modified
  modified_base (26)..(26): 2'-O-methyl modified
  modified_base (27)..(27): 2'-O-methyl modified
  modified_base (28)..(28): GalNAc-conjugated
  modified_base (29)..(29): GalNAc-conjugated
  modified_base (30)..(30): GalNAc-conjugated
  modified_base (31)..(31): 2'-O-methyl modified
  modified_base (32)..(32): 2'-O-methyl modified
  modified_base (33)..(33): 2'-O-methyl modified
  modified_base (34)..(34): 2'-O-methyl modified
  modified_base (35)..(35): 2'-O-methyl modified
  modified_base (36)..(36): 2'-O-methyl modified

SEQ ID NO: 1054 - RNA, 36 nt, Artificial Sequence; identical to SEQ ID NO: 874
  synthetic construct
  misc_feature (1)..(2): linked via phosphorothioate
  modified_base (1)..(1): 2'-O-methyl modified
  modified_base (2)..(2): 2'-O-methyl modified
  modified_base (3)..(3): 2'-O-methyl modified
  modified_base (4)..(4): 2'-O-methyl modified
  modified_base (5)..(5): 2'-O-methyl modified
  modified_base (6)..(6): 2'-O-methyl modified
  modified_base (7)..(7): 2'-O-methyl modified
  modified_base (8)..(8): 2'-fluoro modified
  modified_base (9)..(9): 2'-fluoro modified
  modified_base (10)..(10): 2'-fluoro modified
  modified_base (11)..(11): 2'-fluoro modified
  modified_base (12)..(12): 2'-O-methyl modified
  modified_base (13)..(13): 2'-O-methyl modified
  modified_base (14)..(14): 2'-O-methyl modified
  modified_base (15)..(15): 2'-O-methyl modified
  modified_base (16)..(16): 2'-O-methyl modified
  modified_base (17)..(17): 2'-O-methyl modified
  modified_base (18)..(18): 2'-O-methyl modified
  modified_base (19)..(19): 2'-O-methyl modified
  modified_base (20)..(20): 2'-O-methyl modified
  modified_base (21)..(21): 2'-O-methyl modified
  modified_base (22)..(22): 2'-O-methyl modified
  modified_base (23)..(23): 2'-O-methyl modified
  modified_base (24)..(24): 2'-O-methyl modified
  modified_base (25)..(25): 2'-O-methyl modified
  modified_base (26)..(26): 2'-O-methyl modified
  modified_base (27)..(27): 2'-O-methyl modified
  modified_base (28)..(28): GalNAc-conjugated
  modified_base (29)..(29): GalNAc-conjugated
  modified_base (30)..(30): GalNAc-conjugated
  modified_base (31)..(31): 2'-O-methyl modified
  modified_base (32)..(32): 2'-O-methyl modified
  modified_base (33)..(33): 2'-O-methyl modified
  modified_base (34)..(34): 2'-O-methyl modified
  modified_base (35)..(35): 2'-O-methyl modified
  modified_base (36)..(36): 2'-O-methyl modified

SEQ ID NO: 1055 - RNA, 36 nt, Artificial Sequence; identical to SEQ ID NO: 875
  synthetic construct
  misc_feature (1)..(2): linked via phosphorothioate
  modified_base (1)..(1): 2'-O-methyl modified
  modified_base (2)..(2): 2'-O-methyl modified
  modified_base (3)..(3): 2'-O-methyl modified
  modified_base (4)..(4): 2'-O-methyl modified
  modified_base (5)..(5): 2'-O-methyl modified
  modified_base (6)..(6): 2'-O-methyl modified
  modified_base (7)..(7): 2'-O-methyl modified
  modified_base (8)..(8): 2'-fluoro modified
  modified_base (9)..(9): 2'-fluoro modified
  modified_base (10)..(10): 2'-fluoro modified
  modified_base (11)..(11): 2'-fluoro modified
  modified_base (12)..(12): 2'-O-methyl modified
  modified_base (13)..(13): 2'-O-methyl modified
  modified_base (14)..(14): 2'-O-methyl modified
  modified_base (15)..(15): 2'-O-methyl modified
  modified_base (16)..(16): 2'-O-methyl modified
  modified_base (17)..(17): 2'-O-methyl modified
  modified_base (18)..(18): 2'-O-methyl modified
  modified_base (19)..(19): 2'-O-methyl modified
  modified_base (20)..(20): 2'-O-methyl modified
  modified_base (21)..(21): 2'-O-methyl modified
  modified_base (22)..(22): 2'-O-methyl modified
  modified_base (23)..(23): 2'-O-methyl modified
  modified_base (24)..(24): 2'-O-methyl modified
  modified_base (25)..(25): 2'-O-methyl modified
  modified_base (26)..(26): 2'-O-methyl modified
  modified_base (27)..(27): 2'-O-methyl modified
  modified_base (28)..(28): GalNAc-conjugated
  modified_base (29)..(29): GalNAc-conjugated
  modified_base (30)..(30): GalNAc-conjugated
  modified_base (31)..(31): 2'-O-methyl modified
  modified_base (32)..(32): 2'-O-methyl modified
  modified_base (33)..(33): 2'-O-methyl modified
  modified_base (34)..(34): 2'-O-methyl modified
  modified_base (35)..(35): 2'-O-methyl modified
  modified_base (36)..(36): 2'-O-methyl modified

SEQ ID NO: 1056 - RNA, 36 nt, Artificial Sequence; identical to SEQ ID NO: 876
  synthetic construct
  misc_feature (1)..(2): linked via phosphorothioate
  modified_base (1)..(1): 2'-O-methyl modified
  modified_base (2)..(2): 2'-O-methyl modified
  modified_base (3)..(3): 2'-O-methyl modified
  modified_base (4)..(4): 2'-O-methyl modified
  modified_base (5)..(5): 2'-O-methyl modified
  modified_base (6)..(6): 2'-O-methyl modified
  modified_base (7)..(7): 2'-O-methyl modified
  modified_base (8)..(8): 2'-fluoro modified
  modified_base (9)..(9): 2'-fluoro modified
  modified_base (10)..(10): 2'-fluoro modified
  modified_base (11)..(11): 2'-fluoro modified
  modified_base (12)..(12): 2'-O-methyl modified
  modified_base (13)..(13): 2'-O-methyl modified
  modified_base (14)..(14): 2'-O-methyl modified
  modified_base (15)..(15): 2'-O-methyl modified
  modified_base (16)..(16): 2'-O-methyl modified
  modified_base (17)..(17): 2'-O-methyl modified
  modified_base (18)..(18): 2'-O-methyl modified
  modified_base (19)..(19): 2'-O-methyl modified
  modified_base (20)..(20): 2'-O-methyl modified
  modified_base (21)..(21): 2'-O-methyl modified
  modified_base (22)..(22): 2'-O-methyl modified
  modified_base (23)..(23): 2'-O-methyl modified
  modified_base (24)..(24): 2'-O-methyl modified
  modified_base (25)..(25): 2'-O-methyl modified
  modified_base (26)..(26): 2'-O-methyl modified
  modified_base (27)..(27): 2'-O-methyl modified
  modified_base (28)..(28): GalNAc-conjugated
  modified_base (29)..(29): GalNAc-conjugated
  modified_base (30)..(30): GalNAc-conjugated
  modified_base (31)..(31): 2'-O-methyl modified
  modified_base (32)..(32): 2'-O-methyl modified
  modified_base (33)..(33): 2'-O-methyl modified
  modified_base (34)..(34): 2'-O-methyl modified
  modified_base (35)..(35): 2'-O-methyl modified
  modified_base (36)..(36): 2'-O-methyl modified

SEQ ID NO: 1057 - RNA, 36 nt, Artificial Sequence; identical to SEQ ID NO: 877
  synthetic construct
  misc_feature (1)..(2): linked via phosphorothioate
  modified_base (1)..(1): 2'-O-methyl modified
  modified_base (2)..(2): 2'-O-methyl modified
  modified_base (3)..(3): 2'-O-methyl modified
  modified_base (4)..(4): 2'-O-methyl modified
  modified_base (5)..(5): 2'-O-methyl modified
  modified_base (6)..(6): 2'-O-methyl modified
  modified_base (7)..(7): 2'-O-methyl modified
  modified_base (8)..(8): 2'-fluoro modified
  modified_base (9)..(9): 2'-fluoro modified
  modified_base (10)..(10): 2'-fluoro modified
  modified_base (11)..(11): 2'-fluoro modified
  modified_base (12)..(12): 2'-O-methyl modified
  modified_base (13)..(13): 2'-O-methyl modified
  modified_base (14)..(14): 2'-O-methyl modified
  modified_base (15)..(15): 2'-O-methyl modified
  modified_base (16)..(16): 2'-O-methyl modified
  modified_base (17)..(17): 2'-O-methyl modified
  modified_base (18)..(18): 2'-O-methyl modified
  modified_base (19)..(19): 2'-O-methyl modified
  modified_base (20)..(20): 2'-O-methyl modified
  modified_base (21)..(21): 2'-O-methyl modified
  modified_base (22)..(22): 2'-O-methyl modified
  modified_base (23)..(23): 2'-O-methyl modified
  modified_base (24)..(24): 2'-O-methyl modified
  modified_base (25)..(25): 2'-O-methyl modified
  modified_base (26)..(26): 2'-O-methyl modified
  modified_base (27)..(27): 2'-O-methyl modified
  modified_base (28)..(28): GalNAc-conjugated
  modified_base (29)..(29): GalNAc-conjugated
  modified_base (30)..(30): GalNAc-conjugated
  modified_base (31)..(31): 2'-O-methyl modified
  modified_base (32)..(32): 2'-O-methyl modified
  modified_base (33)..(33): 2'-O-methyl modified
  modified_base (34)..(34): 2'-O-methyl modified
  modified_base (35)..(35): 2'-O-methyl modified
  modified_base (36)..(36): 2'-O-methyl modified

SEQ ID NO: 1058 - RNA, 36 nt, Artificial Sequence; identical to SEQ ID NO: 878
  synthetic construct
  misc_feature (1)..(2): linked via phosphorothioate
  modified_base (1)..(1): 2'-O-methyl modified
  modified_base (2)..(2): 2'-O-methyl modified
  modified_base (3)..(3): 2'-O-methyl modified
  modified_base (4)..(4): 2'-O-methyl modified
  modified_base (5)..(5): 2'-O-methyl modified
  modified_base (6)..(6): 2'-O-methyl modified
  modified_base (7)..(7): 2'-O-methyl modified
  modified_base (8)..(8): 2'-fluoro modified
  modified_base (9)..(9): 2'-fluoro modified
  modified_base (10)..(10): 2'-fluoro modified
  modified_base (11)..(11): 2'-fluoro modified
  modified_base (12)..(12): 2'-O-methyl modified
  modified_base (13)..(13): 2'-O-methyl modified
  modified_base (14)..(14): 2'-O-methyl modified
  modified_base (15)..(15): 2'-O-methyl modified
  modified_base (16)..(16): 2'-O-methyl modified
  modified_base (17)..(17): 2'-O-methyl modified
  modified_base (18)..(18): 2'-O-methyl modified
  modified_base (19)..(19): 2'-O-methyl modified
  modified_base (20)..(20): 2'-O-methyl modified
  modified_base (21)..(21): 2'-O-methyl modified
  modified_base (22)..(22): 2'-O-methyl modified
  modified_base (23)..(23): 2'-O-methyl modified
  modified_base (24)..(24): 2'-O-methyl modified
  modified_base (25)..(25): 2'-O-methyl modified
  modified_base (26)..(26): 2'-O-methyl modified
  modified_base (27)..(27): 2'-O-methyl modified
  modified_base (28)..(28): GalNAc-conjugated
  modified_base (29)..(29): GalNAc-conjugated
  modified_base (30)..(30): GalNAc-conjugated
  modified_base (31)..(31): 2'-O-methyl modified
  modified_base (32)..(32): 2'-O-methyl modified
  modified_base (33)..(33): 2'-O-methyl modified
  modified_base (34)..(34): 2'-O-methyl modified
  modified_base (35)..(35): 2'-O-methyl modified
  modified_base (36)..(36): 2'-O-methyl modified

SEQ ID NO: 1059 - RNA, 36 nt, Artificial Sequence; identical to SEQ ID NO: 879
  synthetic construct
  misc_feature (1)..(2): linked via phosphorothioate
  modified_base (1)..(1): 2'-O-methyl modified
  modified_base (2)..(2): 2'-O-methyl modified
  modified_base (3)..(3): 2'-O-methyl modified
  modified_base (4)..(4): 2'-O-methyl modified
  modified_base (5)..(5): 2'-O-methyl modified
  modified_base (6)..(6): 2'-O-methyl modified
  modified_base (7)..(7): 2'-O-methyl modified
  modified_base (8)..(8): 2'-fluoro modified
  modified_base (9)..(9): 2'-fluoro modified
  modified_base (10)..(10): 2'-fluoro modified
  modified_base (11)..(11): 2'-fluoro modified
  modified_base (12)..(12): 2'-O-methyl modified
  modified_base (13)..(13): 2'-O-methyl modified
  modified_base (14)..(14): 2'-O-methyl modified
  modified_base (15)..(15): 2'-O-methyl modified
  modified_base (16)..(16): 2'-O-methyl modified
  modified_base (17)..(17): 2'-O-methyl modified
  modified_base (18)..(18): 2'-O-methyl modified
  modified_base (19)..(19): 2'-O-methyl modified
  modified_base (20)..(20): 2'-O-methyl modified
  modified_base (21)..(21): 2'-O-methyl modified
  modified_base (22)..(22): 2'-O-methyl modified
  modified_base (23)..(23): 2'-O-methyl modified
  modified_base (24)..(24): 2'-O-methyl modified
  modified_base (25)..(25): 2'-O-methyl modified
  modified_base (26)..(26): 2'-O-methyl modified
  modified_base (27)..(27): 2'-O-methyl modified
  modified_base (28)..(28): GalNAc-conjugated
  modified_base (29)..(29): GalNAc-conjugated
  modified_base (30)..(30): GalNAc-conjugated
  modified_base (31)..(31): 2'-O-methyl modified
  modified_base (32)..(32): 2'-O-methyl modified
  modified_base (33)..(33): 2'-O-methyl modified
  modified_base (34)..(34): 2'-O-methyl modified
  modified_base (35)..(35): 2'-O-methyl modified
  modified_base (36)..(36): 2'-O-methyl modified

SEQ ID NO: 1060 - RNA, 36 nt, Artificial Sequence; identical to SEQ ID NO: 880
  synthetic construct
  misc_feature (1)..(2): linked via phosphorothioate
  modified_base (1)..(1): 2'-O-methyl modified
  modified_base (2)..(2): 2'-O-methyl modified
  modified_base (3)..(3): 2'-O-methyl modified
  modified_base (4)..(4): 2'-O-methyl modified
  modified_base (5)..(5): 2'-O-methyl modified
  modified_base (6)..(6): 2'-O-methyl modified
  modified_base (7)..(7): 2'-O-methyl modified
  modified_base (8)..(8): 2'-fluoro modified
  modified_base (9)..(9): 2'-fluoro modified
  modified_base (10)..(10): 2'-fluoro modified
  modified_base (11)..(11): 2'-fluoro modified
  modified_base (12)..(12): 2'-O-methyl modified
  modified_base (13)..(13): 2'-O-methyl modified
  modified_base (14)..(14): 2'-O-methyl modified
  modified_base (15)..(15): 2'-O-methyl modified
  modified_base (16)..(16): 2'-O-methyl modified
  modified_base (17)..(17): 2'-O-methyl modified
  modified_base (18)..(18): 2'-O-methyl modified
  modified_base (19)..(19): 2'-O-methyl modified
  modified_base (20)..(20): 2'-O-methyl modified
  modified_base (21)..(21): 2'-O-methyl modified
  modified_base (22)..(22): 2'-O-methyl modified
  modified_base (23)..(23): 2'-O-methyl modified
  modified_base (24)..(24): 2'-O-methyl modified
  modified_base (25)..(25): 2'-O-methyl modified
  modified_base (26)..(26): 2'-O-methyl modified
  modified_base (27)..(27): 2'-O-methyl modified
  modified_base (28)..(28): GalNAc-conjugated
  modified_base (29)..(29): GalNAc-conjugated
  modified_base (30)..(30): GalNAc-conjugated
  modified_base (31)..(31): 2'-O-methyl modified
  modified_base (32)..(32): 2'-O-methyl modified
  modified_base (33)..(33): 2'-O-methyl modified
  modified_base (34)..(34): 2'-O-methyl modified
  modified_base (35)..(35): 2'-O-methyl modified
  modified_base (36)..(36): 2'-O-methyl modified

SEQ ID NO: 1061 - RNA, 36 nt, Artificial Sequence; identical to SEQ ID NO: 881
  synthetic construct
  misc_feature (1)..(2): linked via phosphorothioate
  modified_base (1)..(1): 2'-O-methyl modified
  modified_base (2)..(2): 2'-O-methyl modified
  modified_base (3)..(3): 2'-O-methyl modified
  modified_base (4)..(4): 2'-O-methyl modified
  modified_base (5)..(5): 2'-O-methyl modified
  modified_base (6)..(6): 2'-O-methyl modified
  modified_base (7)..(7): 2'-O-methyl modified
  modified_base (8)..(8): 2'-fluoro modified
  modified_base (9)..(9): 2'-fluoro modified
  modified_base (10)..(10): 2'-fluoro modified
  modified_base (11)..(11): 2'-fluoro modified
  modified_base (12)..(12): 2'-O-methyl modified
  modified_base (13)..(13): 2'-O-methyl modified
  modified_base (14)..(14): 2'-O-methyl modified
  modified_base (15)..(15): 2'-O-methyl modified
  modified_base (16)..(16): 2'-O-methyl modified
  modified_base (17)..(17): 2'-O-methyl modified
  modified_base (18)..(18): 2'-O-methyl modified
  modified_base (19)..(19): 2'-O-methyl modified
  modified_base (20)..(20): 2'-O-methyl modified
  modified_base (21)..(21): 2'-O-methyl modified
  modified_base (22)..(22): 2'-O-methyl modified
  modified_base (23)..(23): 2'-O-methyl modified
  modified_base (24)..(24): 2'-O-methyl modified
  modified_base (25)..(25): 2'-O-methyl modified
  modified_base (26)..(26): 2'-O-methyl modified
  modified_base (27)..(27): 2'-O-methyl modified
  modified_base (28)..(28): GalNAc-conjugated
  modified_base (29)..(29): GalNAc-conjugated
  modified_base (30)..(30): GalNAc-conjugated
  modified_base (31)..(31): 2'-O-methyl modified
  modified_base (32)..(32): 2'-O-methyl modified
  modified_base (33)..(33): 2'-O-methyl modified
  modified_base (34)..(34): 2'-O-methyl modified
  modified_base (35)..(35): 2'-O-methyl modified
  modified_base (36)..(36): 2'-O-methyl modified

SEQ ID NO: 1062 - RNA, 36 nt, Artificial Sequence; identical to SEQ ID NO: 882
  synthetic construct
  misc_feature (1)..(2): linked via phosphorothioate
  modified_base (1)..(1): 2'-O-methyl modified
  modified_base (2)..(2): 2'-O-methyl modified
  modified_base (3)..(3): 2'-O-methyl modified
  modified_base (4)..(4): 2'-O-methyl modified
  modified_base (5)..(5): 2'-O-methyl modified
  modified_base (6)..(6): 2'-O-methyl modified
  modified_base (7)..(7): 2'-O-methyl modified
  modified_base (8)..(8): 2'-fluoro modified
  modified_base (9)..(9): 2'-fluoro modified
  modified_base (10)..(10): 2'-fluoro modified
  modified_base (11)..(11): 2'-fluoro modified
  modified_base (12)..(12): 2'-O-methyl modified
  modified_base (13)..(13): 2'-O-methyl modified
  modified_base (14)..(14): 2'-O-methyl modified
  modified_base (15)..(15): 2'-O-methyl modified
  modified_base (16)..(16): 2'-O-methyl modified
  modified_base (17)..(17): 2'-O-methyl modified
  modified_base (18)..(18): 2'-O-methyl modified
  modified_base (19)..(19): 2'-O-methyl modified
  modified_base (20)..(20): 2'-O-methyl modified
  modified_base (21)..(21): 2'-O-methyl modified
  modified_base (22)..(22): 2'-O-methyl modified
  modified_base (23)..(23): 2'-O-methyl modified
  modified_base (24)..(24): 2'-O-methyl modified
  modified_base (25)..(25): 2'-O-methyl modified
  modified_base (26)..(26): 2'-O-methyl modified
  modified_base (27)..(27): 2'-O-methyl modified
  modified_base (28)..(28): GalNAc-conjugated
  modified_base (29)..(29): GalNAc-conjugated
  modified_base (30)..(30): GalNAc-conjugated
  modified_base (31)..(31): 2'-O-methyl modified
  modified_base (32)..(32): 2'-O-methyl modified
  modified_base (33)..(33): 2'-O-methyl modified
  modified_base (34)..(34): 2'-O-methyl modified
  modified_base (35)..(35): 2'-O-methyl modified
  modified_base (36)..(36): 2'-O-methyl modified

SEQ ID NO: 1063 - RNA, 36 nt, Artificial Sequence; identical to SEQ ID NO: 883
  synthetic construct
  misc_feature (1)..(2): linked via phosphorothioate
  modified_base (1)..(1): 2'-O-methyl modified
  modified_base (2)..(2): 2'-O-methyl modified
  modified_base (3)..(3): 2'-O-methyl modified
  modified_base (4)..(4): 2'-O-methyl modified
  modified_base (5)..(5): 2'-O-methyl modified
  modified_base (6)..(6): 2'-O-methyl modified
  modified_base (7)..(7): 2'-O-methyl modified
  modified_base (8)..(8): 2'-fluoro modified
  modified_base (9)..(9): 2'-fluoro modified
  modified_base (10)..(10): 2'-fluoro modified
  modified_base (11)..(11): 2'-fluoro modified
  modified_base (12)..(12): 2'-O-methyl modified
  modified_base (13)..(13): 2'-O-methyl modified
  modified_base (14)..(14): 2'-O-methyl modified
  modified_base (15)..(15): 2'-O-methyl modified
  modified_base (16)..(16): 2'-O-methyl modified
  modified_base (17)..(17): 2'-O-methyl modified
  modified_base (18)..(18): 2'-O-methyl modified
  modified_base (19)..(19): 2'-O-methyl modified
  modified_base (20)..(20): 2'-O-methyl modified
  modified_base (21)..(21): 2'-O-methyl modified
  modified_base (22)..(22): 2'-O-methyl modified
  modified_base (23)..(23): 2'-O-methyl modified
  modified_base (24)..(24): 2'-O-methyl modified
  modified_base (25)..(25): 2'-O-methyl modified
  modified_base (26)..(26): 2'-O-methyl modified
  modified_base (27)..(27): 2'-O-methyl modified
  modified_base (28)..(28): GalNAc-conjugated
  modified_base (29)..(29): GalNAc-conjugated
  modified_base (30)..(30): GalNAc-conjugated
  modified_base (31)..(31): 2'-O-methyl modified
  modified_base (32)..(32): 2'-O-methyl modified
  modified_base (33)..(33): 2'-O-methyl modified
  modified_base (34)..(34): 2'-O-methyl modified
  modified_base (35)..(35): 2'-O-methyl modified
  modified_base (36)..(36): 2'-O-methyl modified

SEQ ID NO: 1064 - RNA, 36 nt, Artificial Sequence; identical to SEQ ID NO: 884
  synthetic construct
  misc_feature (1)..(2): linked via phosphorothioate
  modified_base (1)..(1): 2'-O-methyl modified
  modified_base (2)..(2): 2'-O-methyl modified
  modified_base (3)..(3): 2'-O-methyl modified
  modified_base (4)..(4): 2'-O-methyl modified
  modified_base (5)..(5): 2'-O-methyl modified
  modified_base (6)..(6): 2'-O-methyl modified
  modified_base (7)..(7): 2'-O-methyl modified
  modified_base (8)..(8): 2'-fluoro modified
  modified_base (9)..(9): 2'-fluoro modified
  modified_base (10)..(10): 2'-fluoro modified
  modified_base (11)..(11): 2'-fluoro modified
  modified_base (12)..(12): 2'-O-methyl modified
  modified_base (13)..(13): 2'-O-methyl modified
  modified_base (14)..(14): 2'-O-methyl modified
  modified_base (15)..(15): 2'-O-methyl modified
  modified_base (16)..(16): 2'-O-methyl modified
  modified_base (17)..(17): 2'-O-methyl modified
  modified_base (18)..(18): 2'-O-methyl modified
  modified_base (19)..(19): 2'-O-methyl modified
  modified_base (20)..(20): 2'-O-methyl modified
  modified_base (21)..(21): 2'-O-methyl modified
  modified_base (22)..(22): 2'-O-methyl modified
  modified_base (23)..(23): 2'-O-methyl modified
  modified_base (24)..(24): 2'-O-methyl modified
  modified_base (25)..(25): 2'-O-methyl modified
  modified_base (26)..(26): 2'-O-methyl modified
  modified_base (27)..(27): 2'-O-methyl modified
  modified_base (28)..(28): GalNAc-conjugated
  modified_base (29)..(29): GalNAc-conjugated
  modified_base (30)..(30): GalNAc-conjugated
  modified_base (31)..(31): 2'-O-methyl modified
  modified_base (32)..(32): 2'-O-methyl modified
  modified_base (33)..(33): 2'-O-methyl modified
  modified_base (34)..(34): 2'-O-methyl modified
  modified_base (35)..(35): 2'-O-methyl modified
  modified_base (36)..(36): 2'-O-methyl modified

SEQ ID NO: 1065 - RNA, 36 nt, Artificial Sequence; identical to SEQ ID NO: 885
  synthetic construct
  misc_feature (1)..(2): linked via phosphorothioate
  modified_base (1)..(1): 2'-O-methyl modified
  modified_base (2)..(2): 2'-O-methyl modified
  modified_base (3)..(3): 2'-O-methyl modified
  modified_base (4)..(4): 2'-O-methyl modified
  modified_base (5)..(5): 2'-O-methyl modified
  modified_base (6)..(6): 2'-O-methyl modified
  modified_base (7)..(7): 2'-O-methyl modified
  modified_base (8)..(8): 2'-fluoro modified
  modified_base (9)..(9): 2'-fluoro modified
  modified_base (10)..(10): 2'-fluoro modified
  modified_base (11)..(11): 2'-fluoro modified
  modified_base (12)..(12): 2'-O-methyl modified
  modified_base (13)..(13): 2'-O-methyl modified
  modified_base (14)..(14): 2'-O-methyl modified
  modified_base (15)..(15): 2'-O-methyl modified
  modified_base (16)..(16): 2'-O-methyl modified
  modified_base (17)..(17): 2'-O-methyl modified
  modified_base (18)..(18): 2'-O-methyl modified
  modified_base (19)..(19): 2'-O-methyl modified
  modified_base (20)..(20): 2'-O-methyl modified
  modified_base (21)..(21): 2'-O-methyl modified
  modified_base (22)..(22): 2'-O-methyl modified
  modified_base (23)..(23): 2'-O-methyl modified
  modified_base (24)..(24): 2'-O-methyl modified
  modified_base (25)..(25): 2'-O-methyl modified
  modified_base (26)..(26): 2'-O-methyl modified
  modified_base (27)..(27): 2'-O-methyl modified
  modified_base (28)..(28): GalNAc-conjugated
  modified_base (29)..(29): GalNAc-conjugated
  modified_base (30)..(30): GalNAc-conjugated
  modified_base (31)..(31): 2'-O-methyl modified
  modified_base (32)..(32): 2'-O-methyl modified
  modified_base (33)..(33): 2'-O-methyl modified
  modified_base (34)..(34): 2'-O-methyl modified
  modified_base (35)..(35): 2'-O-methyl modified
  modified_base (36)..(36): 2'-O-methyl modified

SEQ ID NO: 1066 - RNA, 36 nt, Artificial Sequence; identical to SEQ ID NO: 886
  synthetic construct
  misc_feature (1)..(2): linked via phosphorothioate
  modified_base (1)..(1): 2'-O-methyl modified
  modified_base (2)..(2): 2'-O-methyl modified
  modified_base (3)..(3): 2'-O-methyl modified
  modified_base (4)..(4): 2'-O-methyl modified
  modified_base (5)..(5): 2'-O-methyl modified
  modified_base (6)..(6): 2'-O-methyl modified
  modified_base (7)..(7): 2'-O-methyl modified
  modified_base (8)..(8): 2'-fluoro modified
  modified_base (9)..(9): 2'-fluoro modified
  modified_base (10)..(10): 2'-fluoro modified
  modified_base (11)..(11): 2'-fluoro modified
  modified_base (12)..(12): 2'-O-methyl modified
  modified_base (13)..(13): 2'-O-methyl modified
  modified_base (14)..(14): 2'-O-methyl modified
  modified_base (15)..(15): 2'-O-methyl modified
  modified_base (16)..(16): 2'-O-methyl modified
  modified_base (17)..(17): 2'-O-methyl modified
  modified_base (18)..(18): 2'-O-methyl modified
  modified_base (19)..(19): 2'-O-methyl modified
  modified_base (20)..(20): 2'-O-methyl modified
  modified_base (21)..(21): 2'-O-methyl modified
  modified_base (22)..(22): 2'-O-methyl modified
  modified_base (23)..(23): 2'-O-methyl modified
  modified_base (24)..(24): 2'-O-methyl modified
  modified_base (25)..(25): 2'-O-methyl modified
  modified_base (26)..(26): 2'-O-methyl modified
  modified_base (27)..(27): 2'-O-methyl modified
  modified_base (28)..(28): GalNAc-conjugated
  modified_base (29)..(29): GalNAc-conjugated
  modified_base (30)..(30): GalNAc-conjugated
  modified_base (31)..(31): 2'-O-methyl modified
  modified_base (32)..(32): 2'-O-methyl modified
  modified_base (33)..(33): 2'-O-methyl modified
  modified_base (34)..(34): 2'-O-methyl modified
  modified_base (35)..(35): 2'-O-methyl modified
  modified_base (36)..(36): 2'-O-methyl modified

SEQ ID NO: 1067 - RNA, 36 nt, Artificial Sequence; identical to SEQ ID NO: 887
  synthetic construct
  misc_feature (1)..(2): linked via phosphorothioate
  modified_base (1)..(1): 2'-O-methyl modified
  modified_base (2)..(2): 2'-O-methyl modified
  modified_base (3)..(3): 2'-O-methyl modified
  modified_base (4)..(4): 2'-O-methyl modified
  modified_base (5)..(5): 2'-O-methyl modified
  modified_base (6)..(6): 2'-O-methyl modified
  modified_base (7)..(7): 2'-O-methyl modified
  modified_base (8)..(8): 2'-fluoro modified
  modified_base (9)..(9): 2'-fluoro modified
  modified_base (10)..(10): 2'-fluoro modified
  modified_base (11)..(11): 2'-fluoro modified
  modified_base (12)..(12): 2'-O-methyl modified
  modified_base (13)..(13): 2'-O-methyl modified
  modified_base (14)..(14): 2'-O-methyl modified
  modified_base (15)..(15): 2'-O-methyl modified
  modified_base (16)..(16): 2'-O-methyl modified
  modified_base (17)..(17): 2'-O-methyl modified
  modified_base (18)..(18): 2'-O-methyl modified
  modified_base (19)..(19): 2'-O-methyl modified
  modified_base (20)..(20): 2'-O-methyl modified
  modified_base (21)..(21): 2'-O-methyl modified
  modified_base (22)..(22): 2'-O-methyl modified
  modified_base (23)..(23): 2'-O-methyl modified
  modified_base (24)..(24): 2'-O-methyl modified
  modified_base (25)..(25): 2'-O-methyl modified
  modified_base (26)..(26): 2'-O-methyl modified
  modified_base (27)..(27): 2'-O-methyl modified
  modified_base (28)..(28): GalNAc-conjugated
  modified_base (29)..(29): GalNAc-conjugated
  modified_base (30)..(30): GalNAc-conjugated
  modified_base (31)..(31): 2'-O-methyl modified
  modified_base (32)..(32): 2'-O-methyl modified
  modified_base (33)..(33): 2'-O-methyl modified
  modified_base (34)..(34): 2'-O-methyl modified
  modified_base (35)..(35): 2'-O-methyl modified
  modified_base (36)..(36): 2'-O-methyl modified

SEQ ID NO: 1068 - RNA, 36 nt, Artificial Sequence; identical to SEQ ID NO: 888
  synthetic construct
  misc_feature (1)..(2): linked via phosphorothioate
  modified_base (1)..(1): 2'-O-methyl modified
  modified_base (2)..(2): 2'-O-methyl modified
  modified_base (3)..(3): 2'-O-methyl modified
  modified_base (4)..(4): 2'-O-methyl modified
  modified_base (5)..(5): 2'-O-methyl modified
  modified_base (6)..(6): 2'-O-methyl modified
  modified_base (7)..(7): 2'-O-methyl modified
  modified_base (8)..(8): 2'-fluoro modified
  modified_base (9)..(9): 2'-fluoro modified
  modified_base (10)..(10): 2'-fluoro modified
  modified_base (11)..(11): 2'-fluoro modified
  modified_base (12)..(12): 2'-O-methyl modified
  modified_base (13)..(13): 2'-O-methyl modified
  modified_base (14)..(14): 2'-O-methyl modified
  modified_base (15)..(15): 2'-O-methyl modified
  modified_base (16)..(16): 2'-O-methyl modified
  modified_base (17)..(17): 2'-O-methyl modified
  modified_base (18)..(18): 2'-O-methyl modified
  modified_base (19)..(19): 2'-O-methyl modified
  modified_base (20)..(20): 2'-O-methyl modified
  modified_base (21)..(21): 2'-O-methyl modified
  modified_base (22)..(22): 2'-O-methyl modified
  modified_base (23)..(23): 2'-O-methyl modified
  modified_base (24)..(24): 2'-O-methyl modified
  modified_base (25)..(25): 2'-O-methyl modified
  modified_base (26)..(26): 2'-O-methyl modified
  modified_base (27)..(27): 2'-O-methyl modified
  modified_base (28)..(28): GalNAc-conjugated
  modified_base (29)..(29): GalNAc-conjugated
  modified_base (30)..(30): GalNAc-conjugated
  modified_base (31)..(31): 2'-O-methyl modified
  modified_base (32)..(32): 2'-O-methyl modified
  modified_base (33)..(33): 2'-O-methyl modified
  modified_base (34)..(34): 2'-O-methyl modified
  modified_base (35)..(35): 2'-O-methyl modified
  modified_base (36)..(36): 2'-O-methyl modified

SEQ ID NO: 1069 - RNA, 36 nt, Artificial Sequence; identical to SEQ ID NO: 889
  synthetic construct
  misc_feature (1)..(2): linked via phosphorothioate
  modified_base (1)..(1): 2'-O-methyl modified
  modified_base (2)..(2): 2'-O-methyl modified
  modified_base (3)..(3): 2'-O-methyl modified
  modified_base (4)..(4): 2'-O-methyl modified
  modified_base (5)..(5): 2'-O-methyl modified
  modified_base (6)..(6): 2'-O-methyl modified
  modified_base (7)..(7): 2'-O-methyl modified
  modified_base (8)..(8): 2'-fluoro modified
  modified_base (9)..(9): 2'-fluoro modified
  modified_base (10)..(10): 2'-fluoro modified
  modified_base (11)..(11): 2'-fluoro modified
  modified_base (12)..(12): 2'-O-methyl modified
  modified_base (13)..(13): 2'-O-methyl modified
  modified_base (14)..(14): 2'-O-methyl modified
  modified_base (15)..(15): 2'-O-methyl modified
  modified_base (16)..(16): 2'-O-methyl modified
  modified_base (17)..(17): 2'-O-methyl modified
  modified_base (18)..(18): 2'-O-methyl modified
  modified_base (19)..(19): 2'-O-methyl modified
  modified_base (20)..(20): 2'-O-methyl modified
  modified_base (21)..(21): 2'-O-methyl modified
  modified_base (22)..(22): 2'-O-methyl modified
  modified_base (23)..(23): 2'-O-methyl modified
  modified_base (24)..(24): 2'-O-methyl modified
  modified_base (25)..(25): 2'-O-methyl modified
  modified_base (26)..(26): 2'-O-methyl modified
  modified_base (27)..(27): 2'-O-methyl modified
  modified_base (28)..(28): GalNAc-conjugated
  modified_base (29)..(29): GalNAc-conjugated
  modified_base (30)..(30): GalNAc-conjugated
  modified_base (31)..(31): 2'-O-methyl modified
  modified_base (32)..(32): 2'-O-methyl modified
  modified_base (33)..(33): 2'-O-methyl modified
  modified_base (34)..(34): 2'-O-methyl modified
  modified_base (35)..(35): 2'-O-methyl modified
  modified_base (36)..(36): 2'-O-methyl modified

SEQ ID NO: 1070 - RNA, 36 nt, Artificial Sequence; identical to SEQ ID NO: 890
  synthetic construct
  misc_feature (1)..(2): linked via phosphorothioate
  modified_base (1)..(1): 2'-O-methyl modified
  modified_base (2)..(2): 2'-O-methyl modified
  modified_base (3)..(3): 2'-O-methyl modified
  modified_base (4)..(4): 2'-O-methyl modified
  modified_base (5)..(5): 2'-O-methyl modified
  modified_base (6)..(6): 2'-O-methyl modified
  modified_base (7)..(7): 2'-O-methyl modified
  modified_base (8)..(8): 2'-fluoro modified
  modified_base (9)..(9): 2'-fluoro modified
  modified_base (10)..(10): 2'-fluoro modified
  modified_base (11)..(11): 2'-fluoro modified
  modified_base (12)..(12): 2'-O-methyl modified
  modified_base (13)..(13): 2'-O-methyl modified
  modified_base (14)..(14): 2'-O-methyl modified
  modified_base (15)..(15): 2'-O-methyl modified
  modified_base (16)..(16): 2'-O-methyl modified
  modified_base (17)..(17): 2'-O-methyl modified
  modified_base (18)..(18): 2'-O-methyl modified
  modified_base (19)..(19): 2'-O-methyl modified
  modified_base (20)..(20): 2'-O-methyl modified
  modified_base (21)..(21): 2'-O-methyl modified
  modified_base (22)..(22): 2'-O-methyl modified
  modified_base (23)..(23): 2'-O-methyl modified
  modified_base (24)..(24): 2'-O-methyl modified
  modified_base (25)..(25): 2'-O-methyl modified
  modified_base (26)..(26): 2'-O-methyl modified
  modified_base (27)..(27): 2'-O-methyl modified
  modified_base (28)..(28): GalNAc-conjugated
  modified_base (29)..(29): GalNAc-conjugated
  modified_base (30)..(30): GalNAc-conjugated
  modified_base (31)..(31): 2'-O-methyl modified
  modified_base (32)..(32): 2'-O-methyl modified
  modified_base (33)..(33): 2'-O-methyl modified
  modified_base (34)..(34): 2'-O-methyl modified
  modified_base (35)..(35): 2'-O-methyl modified
  modified_base (36)..(36): 2'-O-methyl modified

SEQ ID NO: 1071 - RNA, 36 nt, Artificial Sequence; identical to SEQ ID NO: 891
  synthetic construct
  misc_feature (1)..(2): linked via phosphorothioate
  modified_base (1)..(1): 2'-O-methyl modified
  modified_base (2)..(2): 2'-O-methyl modified
  modified_base (3)..(3): 2'-O-methyl modified
  modified_base (4)..(4): 2'-O-methyl modified
  modified_base (5)..(5): 2'-O-methyl modified
  modified_base (6)..(6): 2'-O-methyl modified
  modified_base (7)..(7): 2'-O-methyl modified
  modified_base (8)..(8): 2'-fluoro modified
  modified_base (9)..(9): 2'-fluoro modified
  modified_base (10)..(10): 2'-fluoro modified
  modified_base (11)..(11): 2'-fluoro modified
  modified_base (12)..(12): 2'-O-methyl modified
  modified_base (13)..(13): 2'-O-methyl modified
  modified_base (14)..(14): 2'-O-methyl modified
  modified_base (15)..(15): 2'-O-methyl modified
  modified_base (16)..(16): 2'-O-methyl modified
  modified_base (17)..(17): 2'-O-methyl modified
  modified_base (18)..(18): 2'-O-methyl modified
  modified_base (19)..(19): 2'-O-methyl modified
  modified_base (20)..(20): 2'-O-methyl modified
  modified_base (21)..(21): 2'-O-methyl modified
  modified_base (22)..(22): 2'-O-methyl modified
  modified_base (23)..(23): 2'-O-methyl modified
  modified_base (24)..(24): 2'-O-methyl modified
  modified_base (25)..(25): 2'-O-methyl modified
  modified_base (26)..(26): 2'-O-methyl modified
  modified_base (27)..(27): 2'-O-methyl modified
  modified_base (28)..(28): GalNAc-conjugated
  modified_base (29)..(29): GalNAc-conjugated
  modified_base (30)..(30): GalNAc-conjugated
  modified_base (31)..(31): 2'-O-methyl modified
  modified_base (32)..(32): 2'-O-methyl modified
  modified_base (33)..(33): 2'-O-methyl modified
  modified_base (34)..(34): 2'-O-methyl modified
  modified_base (35)..(35): 2'-O-methyl modified
  modified_base (36)..(36): 2'-O-methyl modified

SEQ ID NO: 1072 - RNA, 36 nt, Artificial Sequence; identical to SEQ ID NO: 892
  synthetic construct
  misc_feature (1)..(2): linked via phosphorothioate
  modified_base (1)..(1): 2'-O-methyl modified
  modified_base (2)..(2): 2'-O-methyl modified
  modified_base (3)..(3): 2'-O-methyl modified
  modified_base (4)..(4): 2'-O-methyl modified
  modified_base (5)..(5): 2'-O-methyl modified
  modified_base (6)..(6): 2'-O-methyl modified
  modified_base (7)..(7): 2'-O-methyl modified
  modified_base (8)..(8): 2'-fluoro modified
  modified_base (9)..(9): 2'-fluoro modified
  modified_base (10)..(10): 2'-fluoro modified
  modified_base (11)..(11): 2'-fluoro modified
  modified_base (12)..(12): 2'-O-methyl modified
  modified_base (13)..(13): 2'-O-methyl modified
  modified_base (14)..(14): 2'-O-methyl modified
  modified_base (15)..(15): 2'-O-methyl modified
  modified_base (16)..(16): 2'-O-methyl modified
  modified_base (17)..(17): 2'-O-methyl modified
  modified_base (18)..(18): 2'-O-methyl modified
  modified_base (19)..(19): 2'-O-methyl modified
  modified_base (20)..(20): 2'-O-methyl modified
  modified_base (21)..(21): 2'-O-methyl modified
  modified_base (22)..(22): 2'-O-methyl modified
  modified_base (23)..(23): 2'-O-methyl modified
  modified_base (24)..(24): 2'-O-methyl modified
  modified_base (25)..(25): 2'-O-methyl modified
  modified_base (26)..(26): 2'-O-methyl modified
  modified_base (27)..(27): 2'-O-methyl modified
  modified_base (28)..(28): GalNAc-conjugated
  modified_base (29)..(29): GalNAc-conjugated
  modified_base (30)..(30): GalNAc-conjugated
  modified_base (31)..(31): 2'-O-methyl modified
  modified_base (32)..(32): 2'-O-methyl modified
  modified_base (33)..(33): 2'-O-methyl modified
  modified_base (34)..(34): 2'-O-methyl modified
  modified_base (35)..(35): 2'-O-methyl modified
  modified_base (36)..(36): 2'-O-methyl modified

SEQ ID NO: 1073 - RNA, 36 nt, Artificial Sequence; identical to SEQ ID NO: 893
  synthetic construct
  misc_feature (1)..(2): linked via phosphorothioate
  modified_base (1)..(1): 2'-O-methyl modified
  modified_base (2)..(2): 2'-O-methyl modified
  modified_base (3)..(3): 2'-O-methyl modified
  modified_base (4)..(4): 2'-O-methyl modified
  modified_base (5)..(5): 2'-O-methyl modified
  modified_base (6)..(6): 2'-O-methyl modified
  modified_base (7)..(7): 2'-O-methyl modified
  modified_base (8)..(8): 2'-fluoro modified
  modified_base (9)..(9): 2'-fluoro modified
  modified_base (10)..(10): 2'-fluoro modified
  modified_base (11)..(11): 2'-fluoro modified
  modified_base (12)..(12): 2'-O-methyl modified
  modified_base (13)..(13): 2'-O-methyl modified
  modified_base (14)..(14): 2'-O-methyl modified
  modified_base (15)..(15): 2'-O-methyl modified
  modified_base (16)..(16): 2'-O-methyl modified
  modified_base (17)..(17): 2'-O-methyl modified
  modified_base (18)..(18): 2'-O-methyl modified
  modified_base (19)..(19): 2'-O-methyl modified
  modified_base (20)..(20): 2'-O-methyl modified
  modified_base (21)..(21): 2'-O-methyl modified
  modified_base (22)..(22): 2'-O-methyl modified
  modified_base (23)..(23): 2'-O-methyl modified
  modified_base (24)..(24): 2'-O-methyl modified
  modified_base (25)..(25): 2'-O-methyl modified
  modified_base (26)..(26): 2'-O-methyl modified
  modified_base (27)..(27): 2'-O-methyl modified
  modified_base (28)..(28): GalNAc-conjugated
  modified_base (29)..(29): GalNAc-conjugated
  modified_base (30)..(30): GalNAc-conjugated
  modified_base (31)..(31): 2'-O-methyl modified
  modified_base (32)..(32): 2'-O-methyl modified
  modified_base (33)..(33): 2'-O-methyl modified
  modified_base (34)..(34): 2'-O-methyl modified
  modified_base (35)..(35): 2'-O-methyl modified
  modified_base (36)..(36): 2'-O-methyl modified

SEQ ID NO: 1074 - RNA, 36 nt, Artificial Sequence; identical to SEQ ID NO: 894
  synthetic construct
  misc_feature (1)..(2): linked via phosphorothioate
  modified_base (1)..(1): 2'-O-methyl modified
  modified_base (2)..(2): 2'-O-methyl modified
  modified_base (3)..(3): 2'-O-methyl modified
  modified_base (4)..(4): 2'-O-methyl modified
  modified_base (5)..(5): 2'-O-methyl modified
  modified_base (6)..(6): 2'-O-methyl modified
  modified_base (7)..(7): 2'-O-methyl modified
  modified_base (8)..(8): 2'-fluoro modified
  modified_base (9)..(9): 2'-fluoro modified
  modified_base (10)..(10): 2'-fluoro modified
  modified_base (11)..(11): 2'-fluoro modified
  modified_base (12)..(12): 2'-O-methyl modified
  modified_base (13)..(13): 2'-O-methyl modified
  modified_base (14)..(14): 2'-O-methyl modified
  modified_base (15)..(15): 2'-O-methyl modified
  modified_base (16)..(16): 2'-O-methyl modified
  modified_base (17)..(17): 2'-O-methyl modified
  modified_base (18)..(18): 2'-O-methyl modified
  modified_base (19)..(19): 2'-O-methyl modified
  modified_base (20)..(20): 2'-O-methyl modified
  modified_base (21)..(21): 2'-O-methyl modified
  modified_base (22)..(22): 2'-O-methyl modified
  modified_base (23)..(23): 2'-O-methyl modified
  modified_base (24)..(24): 2'-O-methyl modified
  modified_base (25)..(25): 2'-O-methyl modified
  modified_base (26)..(26): 2'-O-methyl modified
  modified_base (27)..(27): 2'-O-methyl modified
  modified_base (28)..(28): GalNAc-conjugated
  modified_base (29)..(29): GalNAc-conjugated
  modified_base (30)..(30): GalNAc-conjugated
  modified_base (31)..(31): 2'-O-methyl modified
  modified_base (32)..(32): 2'-O-methyl modified
  modified_base (33)..(33): 2'-O-methyl modified
  modified_base (34)..(34): 2'-O-methyl modified
  modified_base (35)..(35): 2'-O-methyl modified
  modified_base (36)..(36): 2'-O-methyl modified

SEQ ID NO: 1075 - RNA, 36 nt, Artificial Sequence; identical to SEQ ID NO: 895
  synthetic construct
  misc_feature (1)..(2): linked via phosphorothioate
  modified_base (1)..(1): 2'-O-methyl modified
  modified_base (2)..(2): 2'-O-methyl modified
  modified_base (3)..(3): 2'-O-methyl modified
  modified_base (4)..(4): 2'-O-methyl modified
  modified_base (5)..(5): 2'-O-methyl modified
  modified_base (6)..(6): 2'-O-methyl modified
  modified_base (7)..(7): 2'-O-methyl modified
  modified_base (8)..(8): 2'-fluoro modified
  modified_base (9)..(9): 2'-fluoro modified
  modified_base (10)..(10): 2'-fluoro modified
  modified_base (11)..(11): 2'-fluoro modified
  modified_base (12)..(12): 2'-O-methyl modified
  modified_base (13)..(13): 2'-O-methyl modified
  modified_base (14)..(14): 2'-O-methyl modified
  modified_base (15)..(15): 2'-O-methyl modified
  modified_base (16)..(16): 2'-O-methyl modified
  modified_base (17)..(17): 2'-O-methyl modified
  modified_base (18)..(18): 2'-O-methyl modified
  modified_base (19)..(19): 2'-O-methyl modified
  modified_base (20)..(20): 2'-O-methyl modified
  modified_base (21)..(21): 2'-O-methyl modified
  modified_base (22)..(22): 2'-O-methyl modified
  modified_base (23)..(23): 2'-O-methyl modified
  modified_base (24)..(24): 2'-O-methyl modified
  modified_base (25)..(25): 2'-O-methyl modified
  modified_base (26)..(26): 2'-O-methyl modified
  modified_base (27)..(27): 2'-O-methyl modified
  modified_base (28)..(28): GalNAc-conjugated
  modified_base (29)..(29): GalNAc-conjugated
  modified_base (30)..(30): GalNAc-conjugated
  modified_base (31)..(31): 2'-O-methyl modified
  modified_base (32)..(32): 2'-O-methyl modified
  modified_base (33)..(33): 2'-O-methyl modified
  modified_base (34)..(34): 2'-O-methyl modified
  modified_base (35)..(35): 2'-O-methyl modified
  modified_base (36)..(36): 2'-O-methyl modified

SEQ ID NO: 1076 - RNA, 36 nt, Artificial Sequence; identical to SEQ ID NO: 896
  synthetic construct
  misc_feature (1)..(2): linked via phosphorothioate
  modified_base (1)..(1): 2'-O-methyl modified
  modified_base (2)..(2): 2'-O-methyl modified
  modified_base (3)..(3): 2'-O-methyl modified
  modified_base (4)..(4): 2'-O-methyl modified
  modified_base (5)..(5): 2'-O-methyl modified
  modified_base (6)..(6): 2'-O-methyl modified
  modified_base (7)..(7): 2'-O-methyl modified
  modified_base (8)..(8): 2'-fluoro modified
  modified_base (9)..(9): 2'-fluoro modified
  modified_base (10)..(10): 2'-fluoro modified
  modified_base (11)..(11): 2'-fluoro modified
  modified_base (12)..(12): 2'-O-methyl modified
  modified_base (13)..(13): 2'-O-methyl modified
  modified_base (14)..(14): 2'-O-methyl modified
  modified_base (15)..(15): 2'-O-methyl modified
  modified_base (16)..(16): 2'-O-methyl modified
  modified_base (17)..(17): 2'-O-methyl modified
  modified_base (18)..(18): 2'-O-methyl modified
  modified_base (19)..(19): 2'-O-methyl modified
  modified_base (20)..(20): 2'-O-methyl modified
  modified_base (21)..(21): 2'-O-methyl modified
  modified_base (22)..(22): 2'-O-methyl modified
  modified_base (23)..(23): 2'-O-methyl modified
  modified_base (24)..(24): 2'-O-methyl modified
  modified_base (25)..(25): 2'-O-methyl modified
  modified_base (26)..(26): 2'-O-methyl modified
  modified_base (27)..(27): 2'-O-methyl modified
  modified_base (28)..(28): GalNAc-conjugated
  modified_base (29)..(29): GalNAc-conjugated
  modified_base (30)..(30): GalNAc-conjugated
  modified_base (31)..(31): 2'-O-methyl modified
  modified_base (32)..(32): 2'-O-methyl modified
  modified_base (33)..(33): 2'-O-methyl modified
  modified_base (34)..(34): 2'-O-methyl modified
  modified_base (35)..(35): 2'-O-methyl modified
  modified_base (36)..(36): 2'-O-methyl modified

SEQ ID NO: 1077 - RNA, 36 nt, Artificial Sequence; identical to SEQ ID NO: 897
  synthetic construct
  misc_feature (1)..(2): linked via phosphorothioate
  modified_base (1)..(1): 2'-O-methyl modified
  modified_base (2)..(2): 2'-O-methyl modified
  modified_base (3)..(3): 2'-O-methyl modified
  modified_base (4)..(4): 2'-O-methyl modified
  modified_base (5)..(5): 2'-O-methyl modified
  modified_base (6)..(6): 2'-O-methyl modified
  modified_base (7)..(7): 2'-O-methyl modified
  modified_base (8)..(8): 2'-fluoro modified
  modified_base (9)..(9): 2'-fluoro modified
  modified_base (10)..(10): 2'-fluoro modified
  modified_base (11)..(11): 2'-fluoro modified
  modified_base (12)..(12): 2'-O-methyl modified
  modified_base (13)..(13): 2'-O-methyl modified
  modified_base (14)..(14): 2'-O-methyl modified
  modified_base (15)..(15): 2'-O-methyl modified
  modified_base (16)..(16): 2'-O-methyl modified
  modified_base (17)..(17): 2'-O-methyl modified
  modified_base (18)..(18): 2'-O-methyl modified
  modified_base (19)..(19): 2'-O-methyl modified
  modified_base (20)..(20): 2'-O-methyl modified
  modified_base (21)..(21): 2'-O-methyl modified
  modified_base (22)..(22): 2'-O-methyl modified
  modified_base (23)..(23): 2'-O-methyl modified
  modified_base (24)..(24): 2'-O-methyl modified
  modified_base (25)..(25): 2'-O-methyl modified
  modified_base (26)..(26): 2'-O-methyl modified
  modified_base (27)..(27): 2'-O-methyl modified
  modified_base (28)..(28): GalNAc-conjugated
  modified_base (29)..(29): GalNAc-conjugated
  modified_base (30)..(30): GalNAc-conjugated
  modified_base (31)..(31): 2'-O-methyl modified
  modified_base (32)..(32): 2'-O-methyl modified
  modified_base (33)..(33): 2'-O-methyl modified
  modified_base (34)..(34): 2'-O-methyl modified
  modified_base (35)..(35): 2'-O-methyl modified
  modified_base (36)..(36): 2'-O-methyl modified

SEQ ID NO: 1078 - RNA, 36 nt, Artificial Sequence; identical to SEQ ID NO: 898
  synthetic construct
  misc_feature (1)..(2): linked via phosphorothioate
  modified_base (1)..(1): 2'-O-methyl modified
  modified_base (2)..(2): 2'-O-methyl modified
  modified_base (3)..(3): 2'-O-methyl modified
  modified_base (4)..(4): 2'-O-methyl modified
  modified_base (5)..(5): 2'-O-methyl modified
  modified_base (6)..(6): 2'-O-methyl modified
  modified_base (7)..(7): 2'-O-methyl modified
  modified_base (8)..(8): 2'-fluoro modified
  modified_base (9)..(9): 2'-fluoro modified
  modified_base (10)..(10): 2'-fluoro modified
  modified_base (11)..(11): 2'-fluoro modified
  modified_base (12)..(12): 2'-O-methyl modified
  modified_base (13)..(13): 2'-O-methyl modified
  modified_base (14)..(14): 2'-O-methyl modified
  modified_base (15)..(15): 2'-O-methyl modified
  modified_base (16)..(16): 2'-O-methyl modified
  modified_base (17)..(17): 2'-O-methyl modified
  modified_base (18)..(18): 2'-O-methyl modified
  modified_base (19)..(19): 2'-O-methyl modified
  modified_base (20)..(20): 2'-O-methyl modified
  modified_base (21)..(21): 2'-O-methyl modified
  modified_base (22)..(22): 2'-O-methyl modified
  modified_base (23)..(23): 2'-O-methyl modified
  modified_base (24)..(24): 2'-O-methyl modified
  modified_base (25)..(25): 2'-O-methyl modified
  modified_base (26)..(26): 2'-O-methyl modified
  modified_base (27)..(27): 2'-O-methyl modified
  modified_base (28)..(28): GalNAc-conjugated
  modified_base (29)..(29): GalNAc-conjugated
  modified_base (30)..(30): GalNAc-conjugated
  modified_base (31)..(31): 2'-O-methyl modified
  modified_base (32)..(32): 2'-O-methyl modified
  modified_base (33)..(33): 2'-O-methyl modified
  modified_base (34)..(34): 2'-O-methyl modified
  modified_base (35)..(35): 2'-O-methyl modified
  modified_base (36)..(36): 2'-O-methyl modified

SEQ ID NO: 1079 - RNA, 36 nt, Artificial Sequence; identical to SEQ ID NO: 899
  synthetic construct
  misc_feature (1)..(2): linked via phosphorothioate
  modified_base (1)..(1): 2'-O-methyl modified
  modified_base (2)..(2): 2'-O-methyl modified
  modified_base (3)..(3): 2'-O-methyl modified
  modified_base (4)..(4): 2'-O-methyl modified
  modified_base (5)..(5): 2'-O-methyl modified
  modified_base (6)..(6): 2'-O-methyl modified
  modified_base (7)..(7): 2'-O-methyl modified
  modified_base (8)..(8): 2'-fluoro modified
  modified_base (9)..(9): 2'-fluoro modified
  modified_base (10)..(10): 2'-fluoro modified
  modified_base (11)..(11): 2'-fluoro modified
  modified_base (12)..(12): 2'-O-methyl modified
  modified_base (13)..(13): 2'-O-methyl modified
  modified_base (14)..(14): 2'-O-methyl modified
  modified_base (15)..(15): 2'-O-methyl modified
  modified_base (16)..(16): 2'-O-methyl modified
  modified_base (17)..(17): 2'-O-methyl modified
  modified_base (18)..(18): 2'-O-methyl modified
  modified_base (19)..(19): 2'-O-methyl modified
  modified_base (20)..(20): 2'-O-methyl modified
  modified_base (21)..(21): 2'-O-methyl modified
  modified_base (22)..(22): 2'-O-methyl modified
  modified_base (23)..(23): 2'-O-methyl modified
  modified_base (24)..(24): 2'-O-methyl modified
  modified_base (25)..(25): 2'-O-methyl modified
  modified_base (26)..(26): 2'-O-methyl modified
  modified_base (27)..(27): 2'-O-methyl modified
  modified_base (28)..(28): GalNAc-conjugated
  modified_base (29)..(29): GalNAc-conjugated
  modified_base (30)..(30): GalNAc-conjugated
  modified_base (31)..(31): 2'-O-methyl modified
  modified_base (32)..(32): 2'-O-methyl modified
  modified_base (33)..(33): 2'-O-methyl modified
  modified_base (34)..(34): 2'-O-methyl modified
  modified_base (35)..(35): 2'-O-methyl modified
  modified_base (36)..(36): 2'-O-methyl modified

SEQ ID NO: 1080 - RNA, 36 nt, Artificial Sequence; identical to SEQ ID NO: 900
  synthetic construct
  misc_feature (1)..(2): linked via phosphorothioate
  modified_base (1)..(1): 2'-O-methyl modified
  modified_base (2)..(2): 2'-O-methyl modified
  modified_base (3)..(3): 2'-O-methyl modified
  modified_base (4)..(4): 2'-O-methyl modified
  modified_base (5)..(5): 2'-O-methyl modified
  modified_base (6)..(6): 2'-O-methyl modified
  modified_base (7)..(7): 2'-O-methyl modified
  modified_base (8)..(8): 2'-fluoro modified
  modified_base (9)..(9): 2'-fluoro modified
  modified_base (10)..(10): 2'-fluoro modified
  modified_base (11)..(11): 2'-fluoro modified
  modified_base (12)..(12): 2'-O-methyl modified
  modified_base (13)..(13): 2'-O-methyl modified
  modified_base (14)..(14): 2'-O-methyl modified
  modified_base (15)..(15): 2'-O-methyl modified
  modified_base (16)..(16): 2'-O-methyl modified
  modified_base (17)..(17): 2'-O-methyl modified
  modified_base (18)..(18): 2'-O-methyl modified
  modified_base (19)..(19): 2'-O-methyl modified
  modified_base (20)..(20): 2'-O-methyl modified
  modified_base (21)..(21): 2'-O-methyl modified
  modified_base (22)..(22): 2'-O-methyl modified
  modified_base (23)..(23): 2'-O-methyl modified
  modified_base (24)..(24): 2'-O-methyl modified
  modified_base (25)..(25): 2'-O-methyl modified
  modified_base (26)..(26): 2'-O-methyl modified
  modified_base (27)..(27): 2'-O-methyl modified
  modified_base (28)..(28): GalNAc-conjugated
  modified_base (29)..(29): GalNAc-conjugated
  modified_base (30)..(30): GalNAc-conjugated
  modified_base (31)..(31): 2'-O-methyl modified
  modified_base (32)..(32): 2'-O-methyl modified
  modified_base (33)..(33): 2'-O-methyl modified
  modified_base (34)..(34): 2'-O-methyl modified
  modified_base (35)..(35): 2'-O-methyl modified
  modified_base (36)..(36): 2'-O-methyl modified

SEQ ID NO: 1081 - RNA, 36 nt, Artificial Sequence; identical to SEQ ID NO: 901
  synthetic construct
  misc_feature (1)..(2): linked via phosphorothioate
  modified_base (1)..(1): 2'-O-methyl modified
  modified_base (2)..(2): 2'-O-methyl modified
  modified_base (3)..(3): 2'-O-methyl modified
  modified_base (4)..(4): 2'-O-methyl modified
  modified_base (5)..(5): 2'-O-methyl modified
  modified_base (6)..(6): 2'-O-methyl modified
  modified_base (7)..(7): 2'-O-methyl modified
  modified_base (8)..(8): 2'-fluoro modified
  modified_base (9)..(9): 2'-fluoro modified
  modified_base (10)..(10): 2'-fluoro modified
  modified_base (11)..(11): 2'-fluoro modified
  modified_base (12)..(12): 2'-O-methyl modified
  modified_base (13)..(13): 2'-O-methyl modified
  modified_base (14)..(14): 2'-O-methyl modified
  modified_base (15)..(15): 2'-O-methyl modified
  modified_base (16)..(16): 2'-O-methyl modified
  modified_base (17)..(17): 2'-O-methyl modified
  modified_base (18)..(18): 2'-O-methyl modified
  modified_base (19)..(19): 2'-O-methyl modified
  modified_base (20)..(20): 2'-O-methyl modified
  modified_base (21)..(21): 2'-O-methyl modified
  modified_base (22)..(22): 2'-O-methyl modified
  modified_base (23)..(23): 2'-O-methyl modified
  modified_base (24)..(24): 2'-O-methyl modified
  modified_base (25)..(25): 2'-O-methyl modified
  modified_base (26)..(26): 2'-O-methyl modified
  modified_base (27)..(27): 2'-O-methyl modified
  modified_base (28)..(28): GalNAc-conjugated
  modified_base (29)..(29): GalNAc-conjugated
  modified_base (30)..(30): GalNAc-conjugated
  modified_base (31)..(31): 2'-O-methyl modified
  modified_base (32)..(32): 2'-O-methyl modified
  modified_base (33)..(33): 2'-O-methyl modified
  modified_base (34)..(34): 2'-O-methyl modified
  modified_base (35)..(35): 2'-O-methyl modified
  modified_base (36)..(36): 2'-O-methyl modified

SEQ ID NO: 1082 - RNA, 36 nt, Artificial Sequence; identical to SEQ ID NO: 902
  synthetic construct
  misc_feature (1)..(2): linked via phosphorothioate
  modified_base (1)..(1): 2'-O-methyl modified
  modified_base (2)..(2): 2'-O-methyl modified
  modified_base (3)..(3): 2'-O-methyl modified
  modified_base (4)..(4): 2'-O-methyl modified
  modified_base (5)..(5): 2'-O-methyl modified
  modified_base (6)..(6): 2'-O-methyl modified
  modified_base (7)..(7): 2'-O-methyl modified
  modified_base (8)..(8): 2'-fluoro modified
  modified_base (9)..(9): 2'-fluoro modified
  modified_base (10)..(10): 2'-fluoro modified
  modified_base (11)..(11): 2'-fluoro modified
  modified_base (12)..(12): 2'-O-methyl modified
  modified_base (13)..(13): 2'-O-methyl modified
  modified_base (14)..(14): 2'-O-methyl modified
  modified_base (15)..(15): 2'-O-methyl modified
  modified_base (16)..(16): 2'-O-methyl modified
  modified_base (17)..(17): 2'-O-methyl modified
  modified_base (18)..(18): 2'-O-methyl modified
  modified_base (19)..(19): 2'-O-methyl modified
  modified_base (20)..(20): 2'-O-methyl modified
  modified_base (21)..(21): 2'-O-methyl modified
  modified_base (22)..(22): 2'-O-methyl modified
  modified_base (23)..(23): 2'-O-methyl modified
  modified_base (24)..(24): 2'-O-methyl modified
  modified_base (25)..(25): 2'-O-methyl modified
  modified_base (26)..(26): 2'-O-methyl modified
  modified_base (27)..(27): 2'-O-methyl modified
  modified_base (28)..(28): GalNAc-conjugated
  modified_base (29)..(29): GalNAc-conjugated
  modified_base (30)..(30): GalNAc-conjugated
  modified_base (31)..(31): 2'-O-methyl modified
  modified_base (32)..(32): 2'-O-methyl modified
  modified_base (33)..(33): 2'-O-methyl modified
  modified_base (34)..(34): 2'-O-methyl modified
  modified_base (35)..(35): 2'-O-methyl modified
  modified_base (36)..(36): 2'-O-methyl modified

SEQ ID NO: 1083 - RNA, 36 nt, Artificial Sequence; identical to SEQ ID NO: 903
  synthetic construct
  misc_feature (1)..(2): linked via phosphorothioate
  modified_base (1)..(1): 2'-O-methyl modified
  modified_base (2)..(2): 2'-O-methyl modified
  modified_base (3)..(3): 2'-O-methyl modified
  modified_base (4)..(4): 2'-O-methyl modified
  modified_base (5)..(5): 2'-O-methyl modified
  modified_base (6)..(6): 2'-O-methyl modified
  modified_base (7)..(7): 2'-O-methyl modified
  modified_base (8)..(8): 2'-fluoro modified
  modified_base (9)..(9): 2'-fluoro modified
  modified_base (10)..(10): 2'-fluoro modified
  modified_base (11)..(11): 2'-fluoro modified
  modified_base (12)..(12): 2'-O-methyl modified
  modified_base (13)..(13): 2'-O-methyl modified
  modified_base (14)..(14): 2'-O-methyl modified
  modified_base (15)..(15): 2'-O-methyl modified
  modified_base (16)..(16): 2'-O-methyl modified
  modified_base (17)..(17): 2'-O-methyl modified
  modified_base (18)..(18): 2'-O-methyl modified
  modified_base (19)..(19): 2'-O-methyl modified
  modified_base (20)..(20): 2'-O-methyl modified
  modified_base (21)..(21): 2'-O-methyl modified
  modified_base (22)..(22): 2'-O-methyl modified
  modified_base (23)..(23): 2'-O-methyl modified
  modified_base (24)..(24): 2'-O-methyl modified
  modified_base (25)..(25): 2'-O-methyl modified
  modified_base (26)..(26): 2'-O-methyl modified
  modified_base (27)..(27): 2'-O-methyl modified
  modified_base (28)..(28): GalNAc-conjugated
  modified_base (29)..(29): GalNAc-conjugated
  modified_base (30)..(30): GalNAc-conjugated
  modified_base (31)..(31): 2'-O-methyl modified
  modified_base (32)..(32): 2'-O-methyl modified
  modified_base (33)..(33): 2'-O-methyl modified
  modified_base (34)..(34): 2'-O-methyl modified
  modified_base (35)..(35): 2'-O-methyl modified
  modified_base (36)..(36): 2'-O-methyl modified

SEQ ID NO: 1084 - RNA, 36 nt, Artificial Sequence; identical to SEQ ID NO: 904
  synthetic construct
  misc_feature (1)..(2): linked via phosphorothioate
  modified_base (1)..(1): 2'-O-methyl modified
  modified_base (2)..(2): 2'-O-methyl modified
  modified_base (3)..(3): 2'-O-methyl modified
  modified_base (4)..(4): 2'-O-methyl modified
  modified_base (5)..(5): 2'-O-methyl modified
  modified_base (6)..(6): 2'-O-methyl modified
  modified_base (7)..(7): 2'-O-methyl modified
  modified_base (8)..(8): 2'-fluoro modified
  modified_base (9)..(9): 2'-fluoro modified
  modified_base (10)..(10): 2'-fluoro modified
  modified_base (11)..(11): 2'-fluoro modified
  modified_base (12)..(12): 2'-O-methyl modified
  modified_base (13)..(13): 2'-O-methyl modified
  modified_base (14)..(14): 2'-O-methyl modified
  modified_base (15)..(15): 2'-O-methyl modified
  modified_base (16)..(16): 2'-O-methyl modified
  modified_base (17)..(17): 2'-O-methyl modified
  modified_base (18)..(18): 2'-O-methyl modified
  modified_base (19)..(19): 2'-O-methyl modified
  modified_base (20)..(20): 2'-O-methyl modified
  modified_base (21)..(21): 2'-O-methyl modified
  modified_base (22)..(22): 2'-O-methyl modified
  modified_base (23)..(23): 2'-O-methyl modified
  modified_base (24)..(24): 2'-O-methyl modified
  modified_base (25)..(25): 2'-O-methyl modified
  modified_base (26)..(26): 2'-O-methyl modified
  modified_base (27)..(27): 2'-O-methyl modified
  modified_base (28)..(28): GalNAc-conjugated
  modified_base (29)..(29): GalNAc-conjugated
  modified_base (30)..(30): GalNAc-conjugated
  modified_base (31)..(31): 2'-O-methyl modified
  modified_base (32)..(32): 2'-O-methyl modified
  modified_base (33)..(33): 2'-O-methyl modified
  modified_base (34)..(34): 2'-O-methyl modified
  modified_base (35)..(35): 2'-O-methyl modified
  modified_base (36)..(36): 2'-O-methyl modified

SEQ ID NO: 1085 - RNA, 36 nt, Artificial Sequence; identical to SEQ ID NO: 905
  synthetic construct

SEQ ID NO: 1086 - RNA, 36 nt, Artificial Sequence; identical to SEQ ID NO: 906
  synthetic construct
  misc_feature (1)..(2): linked via phosphorothioate
  modified_base (1)..(1): 2'-O-methyl modified
  modified_base (2)..(2): 2'-O-methyl modified
  modified_base (3)..(3): 2'-O-methyl modified
  modified_base (4)..(4): 2'-O-methyl modified
  modified_base (5)..(5): 2'-O-methyl modified
  modified_base (6)..(6): 2'-O-methyl modified
  modified_base (7)..(7): 2'-O-methyl modified
  modified_base (8)..(8): 2'-fluoro modified
  modified_base (9)..(9): 2'-fluoro modified
  modified_base (10)..(10): 2'-fluoro modified
  modified_base (11)..(11): 2'-fluoro modified
  modified_base (12)..(12): 2'-O-methyl modified
  modified_base (13)..(13): 2'-O-methyl modified
  modified_base (14)..(14): 2'-O-methyl modified
  modified_base (15)..(15): 2'-O-methyl modified
  modified_base (16)..(16): 2'-O-methyl modified
  modified_base (17)..(17): 2'-O-methyl modified
  modified_base (18)..(18): 2'-O-methyl modified
  modified_base (19)..(19): 2'-O-methyl modified
  modified_base (20)..(20): 2'-O-methyl modified
  modified_base (21)..(21): 2'-O-methyl modified
  modified_base (22)..(22): 2'-O-methyl modified
  modified_base (23)..(23): 2'-O-methyl modified
  modified_base (24)..(24): 2'-O-methyl modified
  modified_base (25)..(25): 2'-O-methyl modified
  modified_base (26)..(26): 2'-O-methyl modified
  modified_base (27)..(27): 2'-O-methyl modified
  modified_base (28)..(28): GalNAc-conjugated
  modified_base (29)..(29): GalNAc-conjugated
  modified_base (30)..(30): GalNAc-conjugated
  modified_base (31)..(31): 2'-O-methyl modified
  modified_base (32)..(32): 2'-O-methyl modified
  modified_base (33)..(33): 2'-O-methyl modified
  modified_base (34)..(34): 2'-O-methyl modified
  modified_base (35)..(35): 2'-O-methyl modified
  modified_base (36)..(36): 2'-O-methyl modified

SEQ ID NO: 1087 - RNA, 36 nt, Artificial Sequence; identical to SEQ ID NO: 907
  synthetic construct
  misc_feature (1)..(2): linked via phosphorothioate
  modified_base (1)..(1): 2'-O-methyl modified
  modified_base (2)..(2): 2'-O-methyl modified
  modified_base (3)..(3): 2'-O-methyl modified
  modified_base (4)..(4): 2'-O-methyl modified
  modified_base (5)..(5): 2'-O-methyl modified
  modified_base (6)..(6): 2'-O-methyl modified
  modified_base (7)..(7): 2'-O-methyl modified
  modified_base (8)..(8): 2'-fluoro modified
  modified_base (9)..(9): 2'-fluoro modified
  modified_base (10)..(10): 2'-fluoro modified
  modified_base (11)..(11): 2'-fluoro modified
  modified_base (12)..(12): 2'-O-methyl modified
  modified_base (13)..(13): 2'-O-methyl modified
  modified_base (14)..(14): 2'-O-methyl modified
  modified_base (15)..(15): 2'-O-methyl modified
  modified_base (16)..(16): 2'-O-methyl modified
  modified_base (17)..(17): 2'-O-methyl modified
  modified_base (18)..(18): 2'-O-methyl modified
  modified_base (19)..(19): 2'-O-methyl modified
  modified_base (20)..(20): 2'-O-methyl modified
  modified_base (21)..(21): 2'-O-methyl modified
  modified_base (22)..(22): 2'-O-methyl modified
  modified_base (23)..(23): 2'-O-methyl modified
  modified_base (24)..(24): 2'-O-methyl modified
  modified_base (25)..(25): 2'-O-methyl modified
  modified_base (26)..(26): 2'-O-methyl modified
  modified_base (27)..(27): 2'-O-methyl modified
  modified_base (28)..(28): GalNAc-conjugated
  modified_base (29)..(29): GalNAc-conjugated
  modified_base (30)..(30): GalNAc-conjugated
  modified_base (31)..(31): 2'-O-methyl modified
  modified_base (32)..(32): 2'-O-methyl modified
  modified_base (33)..(33): 2'-O-methyl modified
  modified_base (34)..(34): 2'-O-methyl modified
  modified_base (35)..(35): 2'-O-methyl modified
  modified_base (36)..(36): 2'-O-methyl modified

SEQ ID NO: 1088 - RNA, 36 nt, Artificial Sequence; identical to SEQ ID NO: 908
  synthetic construct
  misc_feature (1)..(2): linked via phosphorothioate
  modified_base (1)..(1): 2'-O-methyl modified
  modified_base (2)..(2): 2'-O-methyl modified
  modified_base (3)..(3): 2'-O-methyl modified
  modified_base (4)..(4): 2'-O-methyl modified
  modified_base (5)..(5): 2'-O-methyl modified
  modified_base (6)..(6): 2'-O-methyl modified
  modified_base (7)..(7): 2'-O-methyl modified
  modified_base (8)..(8): 2'-fluoro modified
  modified_base (9)..(9): 2'-fluoro modified
  modified_base (10)..(10): 2'-fluoro modified
  modified_base (11)..(11): 2'-fluoro modified
  modified_base (12)..(12): 2'-O-methyl modified
  modified_base (13)..(13): 2'-O-methyl modified
  modified_base (14)..(14): 2'-O-methyl modified
  modified_base (15)..(15): 2'-O-methyl modified
  modified_base (16)..(16): 2'-O-methyl modified
  modified_base (17)..(17): 2'-O-methyl modified
  modified_base (18)..(18): 2'-O-methyl modified
  modified_base (19)..(19): 2'-O-methyl modified
  modified_base (20)..(20): 2'-O-methyl modified
  modified_base (21)..(21): 2'-O-methyl modified
  modified_base (22)..(22): 2'-O-methyl modified
  modified_base (23)..(23): 2'-O-methyl modified
  modified_base (24)..(24): 2'-O-methyl modified
  modified_base (25)..(25): 2'-O-methyl modified
  modified_base (26)..(26): 2'-O-methyl modified
  modified_base (27)..(27): 2'-O-methyl modified
  modified_base (28)..(28): GalNAc-conjugated
  modified_base (29)..(29): GalNAc-conjugated
  modified_base (30)..(30): GalNAc-conjugated
  modified_base (31)..(31): 2'-O-methyl modified
  modified_base (32)..(32): 2'-O-methyl modified
  modified_base (33)..(33): 2'-O-methyl modified
  modified_base (34)..(34): 2'-O-methyl modified
  modified_base (35)..(35): 2'-O-methyl modified
  modified_base (36)..(36): 2'-O-methyl modified

SEQ ID NO: 1089 - RNA, 36 nt, Artificial Sequence; identical to SEQ ID NO: 909
  synthetic construct
  misc_feature (1)..(2): linked via phosphorothioate
  modified_base (1)..(1): 2'-O-methyl modified
  modified_base (2)..(2): 2'-O-methyl modified
  modified_base (3)..(3): 2'-O-methyl modified
  modified_base (4)..(4): 2'-O-methyl modified
  modified_base (5)..(5): 2'-O-methyl modified
  modified_base (6)..(6): 2'-O-methyl modified
  modified_base (7)..(7): 2'-O-methyl modified
  modified_base (8)..(8): 2'-fluoro modified
  modified_base (9)..(9): 2'-fluoro modified
  modified_base (10)..(10): 2'-fluoro modified
  modified_base (11)..(11): 2'-fluoro modified
  modified_base (12)..(12): 2'-O-methyl modified
  modified_base (13)..(13): 2'-O-methyl modified
  modified_base (14)..(14): 2'-O-methyl modified
  modified_base (15)..(15): 2'-O-methyl modified
  modified_base (16)..(16): 2'-O-methyl modified
  modified_base (17)..(17): 2'-O-methyl modified
  modified_base (18)..(18): 2'-O-methyl modified
  modified_base (19)..(19): 2'-O-methyl modified
  modified_base (20)..(20): 2'-O-methyl modified
  modified_base (21)..(21): 2'-O-methyl modified
  modified_base (22)..(22): 2'-O-methyl modified
  modified_base (23)..(23): 2'-O-methyl modified
  modified_base (24)..(24): 2'-O-methyl modified
  modified_base (25)..(25): 2'-O-methyl modified
  modified_base (26)..(26): 2'-O-methyl modified
  modified_base (27)..(27): 2'-O-methyl modified
  modified_base (28)..(28): GalNAc-conjugated
  modified_base (29)..(29): GalNAc-conjugated
  modified_base (30)..(30): GalNAc-conjugated
  modified_base (31)..(31): 2'-O-methyl modified
  modified_base (32)..(32): 2'-O-methyl modified
  modified_base (33)..(33): 2'-O-methyl modified
  modified_base (34)..(34): 2'-O-methyl modified
  modified_base (35)..(35): 2'-O-methyl modified
  modified_base (36)..(36): 2'-O-methyl modified

SEQ ID NO: 1090 - RNA, 36 nt, Artificial Sequence; identical to SEQ ID NO: 910
  synthetic construct
  misc_feature (1)..(2): linked via phosphorothioate
  modified_base (1)..(1): 2'-O-methyl modified
  modified_base (2)..(2): 2'-O-methyl modified
  modified_base (3)..(3): 2'-O-methyl modified
  modified_base (4)..(4): 2'-O-methyl modified
  modified_base (5)..(5): 2'-O-methyl modified
  modified_base (6)..(6): 2'-O-methyl modified
  modified_base (7)..(7): 2'-O-methyl modified
  modified_base (8)..(8): 2'-fluoro modified
  modified_base (9)..(9): 2'-fluoro modified
  modified_base (10)..(10): 2'-fluoro modified
  modified_base (11)..(11): 2'-fluoro modified
  modified_base (12)..(12): 2'-O-methyl modified
  modified_base (13)..(13): 2'-O-methyl modified
  modified_base (14)..(14): 2'-O-methyl modified
  modified_base (15)..(15): 2'-O-methyl modified
  modified_base (16)..(16): 2'-O-methyl modified
  modified_base (17)..(17): 2'-O-methyl modified
  modified_base (18)..(18): 2'-O-methyl modified
  modified_base (19)..(19): 2'-O-methyl modified
  modified_base (20)..(20): 2'-O-methyl modified
  modified_base (21)..(21): 2'-O-methyl modified
  modified_base (22)..(22): 2'-O-methyl modified
  modified_base (23)..(23): 2'-O-methyl modified
  modified_base (24)..(24): 2'-O-methyl modified
  modified_base (25)..(25): 2'-O-methyl modified
  modified_base (26)..(26): 2'-O-methyl modified
  modified_base (27)..(27): 2'-O-methyl modified
  modified_base (28)..(28): GalNAc-conjugated
  modified_base (29)..(29): GalNAc-conjugated
  modified_base (30)..(30): GalNAc-conjugated
  modified_base (31)..(31): 2'-O-methyl modified
  modified_base (32)..(32): 2'-O-methyl modified
  modified_base (33)..(33): 2'-O-methyl modified
  modified_base (34)..(34): 2'-O-methyl modified
  modified_base (35)..(35): 2'-O-methyl modified
  modified_base (36)..(36): 2'-O-methyl modified

SEQ ID NO: 1091 - RNA, 36 nt, Artificial Sequence; identical to SEQ ID NO: 911
  synthetic construct
  misc_feature (1)..(2): linked via phosphorothioate
  modified_base (1)..(1): 2'-O-methyl modified
  modified_base (2)..(2): 2'-O-methyl modified
  modified_base (3)..(3): 2'-O-methyl modified
  modified_base (4)..(4): 2'-O-methyl modified
  modified_base (5)..(5): 2'-O-methyl modified
  modified_base (6)..(6): 2'-O-methyl modified
  modified_base (7)..(7): 2'-O-methyl modified
  modified_base (8)..(8): 2'-fluoro modified
  modified_base (9)..(9): 2'-fluoro modified
  modified_base (10)..(10): 2'-fluoro modified
  modified_base (11)..(11): 2'-fluoro modified
  modified_base (12)..(12): 2'-O-methyl modified
  modified_base (13)..(13): 2'-O-methyl modified
  modified_base (14)..(14): 2'-O-methyl modified
  modified_base (15)..(15): 2'-O-methyl modified
  modified_base (16)..(16): 2'-O-methyl modified
  modified_base (17)..(17): 2'-O-methyl modified
  modified_base (18)..(18): 2'-O-methyl modified
  modified_base (19)..(19): 2'-O-methyl modified
  modified_base (20)..(20): 2'-O-methyl modified
  modified_base (21)..(21): 2'-O-methyl modified
  modified_base (22)..(22): 2'-O-methyl modified
  modified_base (23)..(23): 2'-O-methyl modified
  modified_base (24)..(24): 2'-O-methyl modified
  modified_base (25)..(25): 2'-O-methyl modified
  modified_base (26)..(26): 2'-O-methyl modified
  modified_base (27)..(27): 2'-O-methyl modified
  modified_base (28)..(28): GalNAc-conjugated
  modified_base (29)..(29): GalNAc-conjugated
  modified_base (30)..(30): GalNAc-conjugated
  modified_base (31)..(31): 2'-O-methyl modified
  modified_base (32)..(32): 2'-O-methyl modified
  modified_base (33)..(33): 2'-O-methyl modified
  modified_base (34)..(34): 2'-O-methyl modified
  modified_base (35)..(35): 2'-O-methyl modified
  modified_base (36)..(36): 2'-O-methyl modified

SEQ ID NO: 1092 - RNA, 36 nt, Artificial Sequence; identical to SEQ ID NO: 912
  synthetic construct
  misc_feature (1)..(2): linked via phosphorothioate
  modified_base (1)..(1): 2'-O-methyl modified
  modified_base (2)..(2): 2'-O-methyl modified
  modified_base (3)..(3): 2'-O-methyl modified
  modified_base (4)..(4): 2'-O-methyl modified
  modified_base (5)..(5): 2'-O-methyl modified
  modified_base (6)..(6): 2'-O-methyl modified
  modified_base (7)..(7): 2'-O-methyl modified
  modified_base (8)..(8): 2'-fluoro modified
  modified_base (9)..(9): 2'-fluoro modified
  modified_base (10)..(10): 2'-fluoro modified
  modified_base (11)..(11): 2'-fluoro modified
  modified_base (12)..(12): 2'-O-methyl modified
  modified_base (13)..(13): 2'-O-methyl modified
  modified_base (14)..(14): 2'-O-methyl modified
  modified_base (15)..(15): 2'-O-methyl modified
  modified_base (16)..(16): 2'-O-methyl modified
  modified_base (17)..(17): 2'-O-methyl modified
  modified_base (18)..(18): 2'-O-methyl modified
  modified_base (19)..(19): 2'-O-methyl modified
  modified_base (20)..(20): 2'-O-methyl modified
  modified_base (21)..(21): 2'-O-methyl modified
  modified_base (22)..(22): 2'-O-methyl modified
  modified_base (23)..(23): 2'-O-methyl modified
  modified_base (24)..(24): 2'-O-methyl modified
  modified_base (25)..(25): 2'-O-methyl modified
  modified_base (26)..(26): 2'-O-methyl modified
  modified_base (27)..(27): 2'-O-methyl modified
  modified_base (28)..(28): GalNAc-conjugated
  modified_base (29)..(29): GalNAc-conjugated
  modified_base (30)..(30): GalNAc-conjugated
  modified_base (31)..(31): 2'-O-methyl modified
  modified_base (32)..(32): 2'-O-methyl modified
  modified_base (33)..(33): 2'-O-methyl modified
  modified_base (34)..(34): 2'-O-methyl modified
  modified_base (35)..(35): 2'-O-methyl modified
  modified_base (36)..(36): 2'-O-methyl modified

SEQ ID NO: 1093 - RNA, 36 nt, Artificial Sequence; identical to SEQ ID NO: 913
  synthetic construct
  misc_feature (1)..(2): linked via phosphorothioate
  modified_base (1)..(1): 2'-O-methyl modified
  modified_base (2)..(2): 2'-O-methyl modified
  modified_base (3)..(3): 2'-O-methyl modified
  modified_base (4)..(4): 2'-O-methyl modified
  modified_base (5)..(5): 2'-O-methyl modified
  modified_base (6)..(6): 2'-O-methyl modified
  modified_base (7)..(7): 2'-O-methyl modified
  modified_base (8)..(8): 2'-fluoro modified
  modified_base (9)..(9): 2'-fluoro modified
  modified_base (10)..(10): 2'-fluoro modified
  modified_base (11)..(11): 2'-fluoro modified
  modified_base (12)..(12): 2'-O-methyl modified
  modified_base (13)..(13): 2'-O-methyl modified
  modified_base (14)..(14): 2'-O-methyl modified
  modified_base (15)..(15): 2'-O-methyl modified
  modified_base (16)..(16): 2'-O-methyl modified
  modified_base (17)..(17): 2'-O-methyl modified
  modified_base (18)..(18): 2'-O-methyl modified
  modified_base (19)..(19): 2'-O-methyl modified
  modified_base (20)..(20): 2'-O-methyl modified
  modified_base (21)..(21): 2'-O-methyl modified
  modified_base (22)..(22): 2'-O-methyl modified
  modified_base (23)..(23): 2'-O-methyl modified
  modified_base (24)..(24): 2'-O-methyl modified
  modified_base (25)..(25): 2'-O-methyl modified
  modified_base (26)..(26): 2'-O-methyl modified
  modified_base (27)..(27): 2'-O-methyl modified
  modified_base (28)..(28): GalNAc-conjugated
  modified_base (29)..(29): GalNAc-conjugated
  modified_base (30)..(30): GalNAc-conjugated
  modified_base (31)..(31): 2'-O-methyl modified
  modified_base (32)..(32): 2'-O-methyl modified
  modified_base (33)..(33): 2'-O-methyl modified
  modified_base (34)..(34): 2'-O-methyl modified
  modified_base (35)..(35): 2'-O-methyl modified
  modified_base (36)..(36): 2'-O-methyl modified

SEQ ID NO: 1094 - RNA, 36 nt, Artificial Sequence; identical to SEQ ID NO: 914
  synthetic construct
  misc_feature (1)..(2): linked via phosphorothioate
  modified_base (1)..(1): 2'-O-methyl modified
  modified_base (2)..(2): 2'-O-methyl modified
  modified_base (3)..(3): 2'-O-methyl modified
  modified_base (4)..(4): 2'-O-methyl modified
  modified_base (5)..(5): 2'-O-methyl modified
  modified_base (6)..(6): 2'-O-methyl modified
  modified_base (7)..(7): 2'-O-methyl modified
  modified_base (8)..(8): 2'-fluoro modified
  modified_base (9)..(9): 2'-fluoro modified
  modified_base (10)..(10): 2'-fluoro modified
  modified_base (11)..(11): 2'-fluoro modified
  modified_base (12)..(12): 2'-O-methyl modified
  modified_base (13)..(13): 2'-O-methyl modified
  modified_base (14)..(14): 2'-O-methyl modified
  modified_base (15)..(15): 2'-O-methyl modified
  modified_base (16)..(16): 2'-O-methyl modified
  modified_base (17)..(17): 2'-O-methyl modified
  modified_base (18)..(18): 2'-O-methyl modified
  modified_base (19)..(19): 2'-O-methyl modified
  modified_base (20)..(20): 2'-O-methyl modified
  modified_base (21)..(21): 2'-O-methyl modified
  modified_base (22)..(22): 2'-O-methyl modified
  modified_base (23)..(23): 2'-O-methyl modified
  modified_base (24)..(24): 2'-O-methyl modified
  modified_base (25)..(25): 2'-O-methyl modified
  modified_base (26)..(26): 2'-O-methyl modified
  modified_base (27)..(27): 2'-O-methyl modified
  modified_base (28)..(28): GalNAc-conjugated
  modified_base (29)..(29): GalNAc-conjugated
  modified_base (30)..(30): GalNAc-conjugated
  modified_base (31)..(31): 2'-O-methyl modified
  modified_base (32)..(32): 2'-O-methyl modified
  modified_base (33)..(33): 2'-O-methyl modified
  modified_base (34)..(34): 2'-O-methyl modified
  modified_base (35)..(35): 2'-O-methyl modified
  modified_base (36)..(36): 2'-O-methyl modified

SEQ ID NO: 1095 - RNA, 36 nt, Artificial Sequence; identical to SEQ ID NO: 915
  synthetic construct
  misc_feature (1)..(2): linked via phosphorothioate
  modified_base (1)..(1): 2'-O-methyl modified
  modified_base (2)..(2): 2'-O-methyl modified
  modified_base (3)..(3): 2'-O-methyl modified
  modified_base (4)..(4): 2'-O-methyl modified
  modified_base (5)..(5): 2'-O-methyl modified
  modified_base (6)..(6): 2'-O-methyl modified
  modified_base (7)..(7): 2'-O-methyl modified
  modified_base (8)..(8): 2'-fluoro modified
  modified_base (9)..(9): 2'-fluoro modified
  modified_base (10)..(10): 2'-fluoro modified
  modified_base (11)..(11): 2'-fluoro modified
  modified_base (12)..(12): 2'-O-methyl modified
  modified_base (13)..(13): 2'-O-methyl modified
  modified_base (14)..(14): 2'-O-methyl modified
  modified_base (15)..(15): 2'-O-methyl modified
  modified_base (16)..(16): 2'-O-methyl modified
  modified_base (17)..(17): 2'-O-methyl modified
  modified_base (18)..(18): 2'-O-methyl modified
  modified_base (19)..(19): 2'-O-methyl modified
  modified_base (20)..(20): 2'-O-methyl modified
  modified_base (21)..(21): 2'-O-methyl modified
  modified_base (22)..(22): 2'-O-methyl modified
  modified_base (23)..(23): 2'-O-methyl modified
  modified_base (24)..(24): 2'-O-methyl modified
  modified_base (25)..(25): 2'-O-methyl modified
  modified_base (26)..(26): 2'-O-methyl modified
  modified_base (27)..(27): 2'-O-methyl modified
  modified_base (28)..(28): GalNAc-conjugated
  modified_base (29)..(29): GalNAc-conjugated
  modified_base (30)..(30): GalNAc-conjugated
  modified_base (31)..(31): 2'-O-methyl modified
  modified_base (32)..(32): 2'-O-methyl modified
  modified_base (33)..(33): 2'-O-methyl modified
  modified_base (34)..(34): 2'-O-methyl modified
  modified_base (35)..(35): 2'-O-methyl modified
  modified_base (36)..(36): 2'-O-methyl modified

SEQ ID NO: 1096 - RNA, 36 nt, Artificial Sequence; identical to SEQ ID NO: 916
  synthetic construct
  misc_feature (1)..(2): linked via phosphorothioate
  modified_base (1)..(1): 2'-O-methyl modified
  modified_base (2)..(2): 2'-O-methyl modified
  modified_base (3)..(3): 2'-O-methyl modified
  modified_base (4)..(4): 2'-O-methyl modified
  modified_base (5)..(5): 2'-O-methyl modified
  modified_base (6)..(6): 2'-O-methyl modified
  modified_base (7)..(7): 2'-O-methyl modified
  modified_base (8)..(8): 2'-fluoro modified
  modified_base (9)..(9): 2'-fluoro modified
  modified_base (10)..(10): 2'-fluoro modified
  modified_base (11)..(11): 2'-fluoro modified
  modified_base (12)..(12): 2'-O-methyl modified
  modified_base (13)..(13): 2'-O-methyl modified
  modified_base (14)..(14): 2'-O-methyl modified
  modified_base (15)..(15): 2'-O-methyl modified
  modified_base (16)..(16): 2'-O-methyl modified
  modified_base (17)..(17): 2'-O-methyl modified
  modified_base (18)..(18): 2'-O-methyl modified
  modified_base (19)..(19): 2'-O-methyl modified
  modified_base (20)..(20): 2'-O-methyl modified
  modified_base (21)..(21): 2'-O-methyl modified
  modified_base (22)..(22): 2'-O-methyl modified
  modified_base (23)..(23): 2'-O-methyl modified
  modified_base (24)..(24): 2'-O-methyl modified
  modified_base (25)..(25): 2'-O-methyl modified
  modified_base (26)..(26): 2'-O-methyl modified
  modified_base (27)..(27): 2'-O-methyl modified
  modified_base (28)..(28): GalNAc-conjugated
  modified_base (29)..(29): GalNAc-conjugated
  modified_base (30)..(30): GalNAc-conjugated
  modified_base (31)..(31): 2'-O-methyl modified
  modified_base (32)..(32): 2'-O-methyl modified
  modified_base (33)..(33): 2'-O-methyl modified
  modified_base (34)..(34): 2'-O-methyl modified
  modified_base (35)..(35): 2'-O-methyl modified
  modified_base (36)..(36): 2'-O-methyl modified

SEQ ID NO: 1097 - RNA, 36 nt, Artificial Sequence; identical to SEQ ID NO: 917
  synthetic construct
  misc_feature (1)..(2): linked via phosphorothioate
  modified_base (1)..(1): 2'-O-methyl modified
  modified_base (2)..(2): 2'-O-methyl modified
  modified_base (3)..(3): 2'-O-methyl modified
  modified_base (4)..(4): 2'-O-methyl modified
  modified_base (5)..(5): 2'-O-methyl modified
  modified_base (6)..(6): 2'-O-methyl modified
  modified_base (7)..(7): 2'-O-methyl modified
  modified_base (8)..(8): 2'-fluoro modified
  modified_base (9)..(9): 2'-fluoro modified
  modified_base (10)..(10): 2'-fluoro modified
  modified_base (11)..(11): 2'-fluoro modified
  modified_base (12)..(12): 2'-O-methyl modified
  modified_base (13)..(13): 2'-O-methyl modified
  modified_base (14)..(14): 2'-O-methyl modified
  modified_base (15)..(15): 2'-O-methyl modified
  modified_base (16)..(16): 2'-O-methyl modified
  modified_base (17)..(17): 2'-O-methyl modified
  modified_base (18)..(18): 2'-O-methyl modified
  modified_base (19)..(19): 2'-O-methyl modified
  modified_base (20)..(20): 2'-O-methyl modified
  modified_base (21)..(21): 2'-O-methyl modified
  modified_base (22)..(22): 2'-O-methyl modified
  modified_base (23)..(23): 2'-O-methyl modified
  modified_base (24)..(24): 2'-O-methyl modified
  modified_base (25)..(25): 2'-O-methyl modified
  modified_base (26)..(26): 2'-O-methyl modified
  modified_base (27)..(27): 2'-O-methyl modified
  modified_base (28)..(28): GalNAc-conjugated
  modified_base (29)..(29): GalNAc-conjugated
  modified_base (30)..(30): GalNAc-conjugated
  modified_base (31)..(31): 2'-O-methyl modified
  modified_base (32)..(32): 2'-O-methyl modified
  modified_base (33)..(33): 2'-O-methyl modified
  modified_base (34)..(34): 2'-O-methyl modified
  modified_base (35)..(35): 2'-O-methyl modified
  modified_base (36)..(36): 2'-O-methyl modified

SEQ ID NO: 1098 - RNA, 36 nt, Artificial Sequence; identical to SEQ ID NO: 918
  synthetic construct
  misc_feature (1)..(2): linked via phosphorothioate
  modified_base (1)..(1): 2'-O-methyl modified
  modified_base (2)..(2): 2'-O-methyl modified
  modified_base (3)..(3): 2'-O-methyl modified
  modified_base (4)..(4): 2'-O-methyl modified
  modified_base (5)..(5): 2'-O-methyl modified
  modified_base (6)..(6): 2'-O-methyl modified
  modified_base (7)..(7): 2'-O-methyl modified
  modified_base (8)..(8): 2'-fluoro modified
  modified_base (9)..(9): 2'-fluoro modified
  modified_base (10)..(10): 2'-fluoro modified
  modified_base (11)..(11): 2'-fluoro modified
  modified_base (12)..(12): 2'-O-methyl modified
  modified_base (13)..(13): 2'-O-methyl modified
  modified_base (14)..(14): 2'-O-methyl modified
  modified_base (15)..(15): 2'-O-methyl modified
  modified_base (16)..(16): 2'-O-methyl modified
  modified_base (17)..(17): 2'-O-methyl modified
  modified_base (18)..(18): 2'-O-methyl modified
  modified_base (19)..(19): 2'-O-methyl modified
  modified_base (20)..(20): 2'-O-methyl modified
  modified_base (21)..(21): 2'-O-methyl modified
  modified_base (22)..(22): 2'-O-methyl modified
  modified_base (23)..(23): 2'-O-methyl modified
  modified_base (24)..(24): 2'-O-methyl modified
  modified_base (25)..(25): 2'-O-methyl modified
  modified_base (26)..(26): 2'-O-methyl modified
  modified_base (27)..(27): 2'-O-methyl modified
  modified_base (28)..(28): GalNAc-conjugated
  modified_base (29)..(29): GalNAc-conjugated
  modified_base (30)..(30): GalNAc-conjugated
  modified_base (31)..(31): 2'-O-methyl modified
  modified_base (32)..(32): 2'-O-methyl modified
  modified_base (33)..(33): 2'-O-methyl modified
  modified_base (34)..(34): 2'-O-methyl modified
  modified_base (35)..(35): 2'-O-methyl modified
  modified_base (36)..(36): 2'-O-methyl modified

SEQ ID NO: 1099 - RNA, 36 nt, Artificial Sequence; identical to SEQ ID NO: 919
  synthetic construct
  misc_feature (1)..(2): linked via phosphorothioate
  modified_base (1)..(1): 2'-O-methyl modified
  modified_base (2)..(2): 2'-O-methyl modified
  modified_base (3)..(3): 2'-O-methyl modified
  modified_base (4)..(4): 2'-O-methyl modified
  modified_base (5)..(5): 2'-O-methyl modified
  modified_base (6)..(6): 2'-O-methyl modified
  modified_base (7)..(7): 2'-O-methyl modified
  modified_base (8)..(8): 2'-fluoro modified
  modified_base (9)..(9): 2'-fluoro modified
  modified_base (10)..(10): 2'-fluoro modified
  modified_base (11)..(11): 2'-fluoro modified
  modified_base (12)..(12): 2'-O-methyl modified
  modified_base (13)..(13): 2'-O-methyl modified
  modified_base (14)..(14): 2'-O-methyl modified
  modified_base (15)..(15): 2'-O-methyl modified
  modified_base (16)..(16): 2'-O-methyl modified
  modified_base (17)..(17): 2'-O-methyl modified
  modified_base (18)..(18): 2'-O-methyl modified
  modified_base (19)..(19): 2'-O-methyl modified
  modified_base (20)..(20): 2'-O-methyl modified
  modified_base (21)..(21): 2'-O-methyl modified
  modified_base (22)..(22): 2'-O-methyl modified
  modified_base (23)..(23): 2'-O-methyl modified
  modified_base (24)..(24): 2'-O-methyl modified
  modified_base (25)..(25): 2'-O-methyl modified
  modified_base (26)..(26): 2'-O-methyl modified
  modified_base (27)..(27): 2'-O-methyl modified
  modified_base (28)..(28): GalNAc-conjugated
  modified_base (29)..(29): GalNAc-conjugated
  modified_base (30)..(30): GalNAc-conjugated
  modified_base (31)..(31): 2'-O-methyl modified
  modified_base (32)..(32): 2'-O-methyl modified
  modified_base (33)..(33): 2'-O-methyl modified
  modified_base (34)..(34): 2'-O-methyl modified
  modified_base (35)..(35): 2'-O-methyl modified
  modified_base (36)..(36): 2'-O-methyl modified

SEQ ID NO: 1100 - RNA, 36 nt, Artificial Sequence; identical to SEQ ID NO: 920
  synthetic construct
  misc_feature (1)..(2): linked via phosphorothioate
  modified_base (1)..(1): 2'-O-methyl modified
  modified_base (2)..(2): 2'-O-methyl modified
  modified_base (3)..(3): 2'-O-methyl modified
  modified_base (4)..(4): 2'-O-methyl modified
  modified_base (5)..(5): 2'-O-methyl modified
  modified_base (6)..(6): 2'-O-methyl modified
  modified_base (7)..(7): 2'-O-methyl modified
  modified_base (8)..(8): 2'-fluoro modified
  modified_base (9)..(9): 2'-fluoro modified
  modified_base (10)..(10): 2'-fluoro modified
  modified_base (11)..(11): 2'-fluoro modified
  modified_base (12)..(12): 2'-O-methyl modified
  modified_base (13)..(13): 2'-O-methyl modified
  modified_base (14)..(14): 2'-O-methyl modified
  modified_base (15)..(15): 2'-O-methyl modified
  modified_base (16)..(16): 2'-O-methyl modified
  modified_base (17)..(17): 2'-O-methyl modified
  modified_base (18)..(18): 2'-O-methyl modified
  modified_base (19)..(19): 2'-O-methyl modified
  modified_base (20)..(20): 2'-O-methyl modified
  modified_base (21)..(21): 2'-O-methyl modified
  modified_base (22)..(22): 2'-O-methyl modified
  modified_base (23)..(23): 2'-O-methyl modified
  modified_base (24)..(24): 2'-O-methyl modified
  modified_base (25)..(25): 2'-O-methyl modified
  modified_base (26)..(26): 2'-O-methyl modified
  modified_base (27)..(27): 2'-O-methyl modified
  modified_base (28)..(28): GalNAc-conjugated
  modified_base (29)..(29): GalNAc-conjugated
  modified_base (30)..(30): GalNAc-conjugated
  modified_base (31)..(31): 2'-O-methyl modified
  modified_base (32)..(32): 2'-O-methyl modified
  modified_base (33)..(33): 2'-O-methyl modified
  modified_base (34)..(34): 2'-O-methyl modified
  modified_base (35)..(35): 2'-O-methyl modified
  modified_base (36)..(36): 2'-O-methyl modified

SEQ ID NO: 1101 - RNA, 36 nt, Artificial Sequence; identical to SEQ ID NO: 921
  synthetic construct
  misc_feature (1)..(2): linked via phosphorothioate
  modified_base (1)..(1): 2'-O-methyl modified
  modified_base (2)..(2): 2'-O-methyl modified
  modified_base (3)..(3): 2'-O-methyl modified
  modified_base (4)..(4): 2'-O-methyl modified
  modified_base (5)..(5): 2'-O-methyl modified
  modified_base (6)..(6): 2'-O-methyl modified
  modified_base (7)..(7): 2'-O-methyl modified
  modified_base (8)..(8): 2'-fluoro modified
  modified_base (9)..(9): 2'-fluoro modified
  modified_base (10)..(10): 2'-fluoro modified
  modified_base (11)..(11): 2'-fluoro modified
  modified_base (12)..(12): 2'-O-methyl modified
  modified_base (13)..(13): 2'-O-methyl modified
  modified_base (14)..(14): 2'-O-methyl modified
  modified_base (15)..(15): 2'-O-methyl modified
  modified_base (16)..(16): 2'-O-methyl modified
  modified_base (17)..(17): 2'-O-methyl modified
  modified_base (18)..(18): 2'-O-methyl modified
  modified_base (19)..(19): 2'-O-methyl modified
  modified_base (20)..(20): 2'-O-methyl modified
  modified_base (21)..(21): 2'-O-methyl modified
  modified_base (22)..(22): 2'-O-methyl modified
  modified_base (23)..(23): 2'-O-methyl modified
  modified_base (24)..(24): 2'-O-methyl modified
  modified_base (25)..(25): 2'-O-methyl modified
  modified_base (26)..(26): 2'-O-methyl modified
  modified_base (27)..(27): 2'-O-methyl modified
  modified_base (28)..(28): GalNAc-conjugated
  modified_base (29)..(29): GalNAc-conjugated
  modified_base (30)..(30): GalNAc-conjugated
  modified_base (31)..(31): 2'-O-methyl modified
  modified_base (32)..(32): 2'-O-methyl modified
  modified_base (33)..(33): 2'-O-methyl modified
  modified_base (34)..(34): 2'-O-methyl modified
  modified_base (35)..(35): 2'-O-methyl modified
  modified_base (36)..(36): 2'-O-methyl modified

SEQ ID NO: 1102 - RNA, 36 nt, Artificial Sequence; identical to SEQ ID NO: 922
  synthetic construct
  misc_feature (1)..(2): linked via phosphorothioate
  modified_base (1)..(1): 2'-O-methyl modified
  modified_base (2)..(2): 2'-O-methyl modified
  modified_base (3)..(3): 2'-O-methyl modified
  modified_base (4)..(4): 2'-O-methyl modified
  modified_base (5)..(5): 2'-O-methyl modified
  modified_base (6)..(6): 2'-O-methyl modified
  modified_base (7)..(7): 2'-O-methyl modified
  modified_base (8)..(8): 2'-fluoro modified
  modified_base (9)..(9): 2'-fluoro modified
  modified_base (10)..(10): 2'-fluoro modified
  modified_base (11)..(11): 2'-fluoro modified
  modified_base (12)..(12): 2'-O-methyl modified
  modified_base (13)..(13): 2'-O-methyl modified
  modified_base (14)..(14): 2'-O-methyl modified
  modified_base (15)..(15): 2'-O-methyl modified
  modified_base (16)..(16): 2'-O-methyl modified
  modified_base (17)..(17): 2'-O-methyl modified
  modified_base (18)..(18): 2'-O-methyl modified
  modified_base (19)..(19): 2'-O-methyl modified
  modified_base (20)..(20): 2'-O-methyl modified
  modified_base (21)..(21): 2'-O-methyl modified
  modified_base (22)..(22): 2'-O-methyl modified
  modified_base (23)..(23): 2'-O-methyl modified
  modified_base (24)..(24): 2'-O-methyl modified
  modified_base (25)..(25): 2'-O-methyl modified
  modified_base (26)..(26): 2'-O-methyl modified
  modified_base (27)..(27): 2'-O-methyl modified
  modified_base (28)..(28): GalNAc-conjugated
  modified_base (29)..(29): GalNAc-conjugated
  modified_base (30)..(30): GalNAc-conjugated
  modified_base (31)..(31): 2'-O-methyl modified
  modified_base (32)..(32): 2'-O-methyl modified
  modified_base (33)..(33): 2'-O-methyl modified
  modified_base (34)..(34): 2'-O-methyl modified
  modified_base (35)..(35): 2'-O-methyl modified
  modified_base (36)..(36): 2'-O-methyl modified

SEQ ID NO: 1103 - RNA, 36 nt, Artificial Sequence; identical to SEQ ID NO: 923
  synthetic construct
  misc_feature (1)..(2): linked via phosphorothioate
  modified_base (1)..(1): 2'-O-methyl modified
  modified_base (2)..(2): 2'-O-methyl modified
  modified_base (3)..(3): 2'-O-methyl modified
  modified_base (4)..(4): 2'-O-methyl modified
  modified_base (5)..(5): 2'-O-methyl modified
  modified_base (6)..(6): 2'-O-methyl modified
  modified_base (7)..(7): 2'-O-methyl modified
  modified_base (8)..(8): 2'-fluoro modified
  modified_base (9)..(9): 2'-fluoro modified
  modified_base (10)..(10): 2'-fluoro modified
  modified_base (11)..(11): 2'-fluoro modified
  modified_base (12)..(12): 2'-O-methyl modified
  modified_base (13)..(13): 2'-O-methyl modified
  modified_base (14)..(14): 2'-O-methyl modified
  modified_base (15)..(15): 2'-O-methyl modified
  modified_base (16)..(16): 2'-O-methyl modified
  modified_base (17)..(17): 2'-O-methyl modified
  modified_base (18)..(18): 2'-O-methyl modified
  modified_base (19)..(19): 2'-O-methyl modified
  modified_base (20)..(20): 2'-O-methyl modified
  modified_base (21)..(21): 2'-O-methyl modified
  modified_base (22)..(22): 2'-O-methyl modified
  modified_base (23)..(23): 2'-O-methyl modified
  modified_base (24)..(24): 2'-O-methyl modified
  modified_base (25)..(25): 2'-O-methyl modified
  modified_base (26)..(26): 2'-O-methyl modified
  modified_base (27)..(27): 2'-O-methyl modified
  modified_base (28)..(28): GalNAc-conjugated
  modified_base (29)..(29): GalNAc-conjugated
  modified_base (30)..(30): GalNAc-conjugated
  modified_base (31)..(31): 2'-O-methyl modified
  modified_base (32)..(32): 2'-O-methyl modified
  modified_base (33)..(33): 2'-O-methyl modified
  modified_base (34)..(34): 2'-O-methyl modified
  modified_base (35)..(35): 2'-O-methyl modified
  modified_base (36)..(36): 2'-O-methyl modified

SEQ ID NO: 1104 - RNA, 36 nt, Artificial Sequence; identical to SEQ ID NO: 924
  synthetic construct
  misc_feature (1)..(2): linked via phosphorothioate
  modified_base (1)..(1): 2'-O-methyl modified
  modified_base (2)..(2): 2'-O-methyl modified
  modified_base (3)..(3): 2'-O-methyl modified
  modified_base (4)..(4): 2'-O-methyl modified
  modified_base (5)..(5): 2'-O-methyl modified
  modified_base (6)..(6): 2'-O-methyl modified
  modified_base (7)..(7): 2'-O-methyl modified
  modified_base (8)..(8): 2'-fluoro modified
  modified_base (9)..(9): 2'-fluoro modified
  modified_base (10)..(10): 2'-fluoro modified
  modified_base (11)..(11): 2'-fluoro modified
  modified_base (12)..(12): 2'-O-methyl modified
  modified_base (13)..(13): 2'-O-methyl modified
  modified_base (14)..(14): 2'-O-methyl modified
  modified_base (15)..(15): 2'-O-methyl modified
  modified_base (16)..(16): 2'-O-methyl modified
  modified_base (17)..(17): 2'-O-methyl modified
  modified_base (18)..(18): 2'-O-methyl modified
  modified_base (19)..(19): 2'-O-methyl modified
  modified_base (20)..(20): 2'-O-methyl modified
  modified_base (21)..(21): 2'-O-methyl modified
  modified_base (22)..(22): 2'-O-methyl modified
  modified_base (23)..(23): 2'-O-methyl modified
  modified_base (24)..(24): 2'-O-methyl modified
  modified_base (25)..(25): 2'-O-methyl modified
  modified_base (26)..(26): 2'-O-methyl modified
  modified_base (27)..(27): 2'-O-methyl modified
  modified_base (28)..(28): GalNAc-conjugated
  modified_base (29)..(29): GalNAc-conjugated
  modified_base (30)..(30): GalNAc-conjugated
  modified_base (31)..(31): 2'-O-methyl modified
  modified_base (32)..(32): 2'-O-methyl modified
  modified_base (33)..(33): 2'-O-methyl modified
  modified_base (34)..(34): 2'-O-methyl modified
  modified_base (35)..(35): 2'-O-methyl modified
  modified_base (36)..(36): 2'-O-methyl modified

SEQ ID NO: 1105 - RNA, 36 nt, Artificial Sequence; identical to SEQ ID NO: 925
  synthetic construct
  misc_feature (1)..(2): linked via phosphorothioate
  modified_base (1)..(1): 2'-O-methyl modified
  modified_base (2)..(2): 2'-O-methyl modified
  modified_base (3)..(3): 2'-O-methyl modified
  modified_base (4)..(4): 2'-O-methyl modified
  modified_base (5)..(5): 2'-O-methyl modified
  modified_base (6)..(6): 2'-O-methyl modified
  modified_base (7)..(7): 2'-O-methyl modified
  modified_base (8)..(8): 2'-fluoro modified
  modified_base (9)..(9): 2'-fluoro modified
  modified_base (10)..(10): 2'-fluoro modified
  modified_base (11)..(11): 2'-fluoro modified
  modified_base (12)..(12): 2'-O-methyl modified
  modified_base (13)..(13): 2'-O-methyl modified
  modified_base (14)..(14): 2'-O-methyl modified
  modified_base (15)..(15): 2'-O-methyl modified
  modified_base (16)..(16): 2'-O-methyl modified
  modified_base (17)..(17): 2'-O-methyl modified
  modified_base (18)..(18): 2'-O-methyl modified
  modified_base (19)..(19): 2'-O-methyl modified
  modified_base (20)..(20): 2'-O-methyl modified
  modified_base (21)..(21): 2'-O-methyl modified
  modified_base (22)..(22): 2'-O-methyl modified
  modified_base (23)..(23): 2'-O-methyl modified
  modified_base (24)..(24): 2'-O-methyl modified
  modified_base (25)..(25): 2'-O-methyl modified
  modified_base (26)..(26): 2'-O-methyl modified
  modified_base (27)..(27): 2'-O-methyl modified
  modified_base (28)..(28): GalNAc-conjugated
  modified_base (29)..(29): GalNAc-conjugated
  modified_base (30)..(30): GalNAc-conjugated
  modified_base (31)..(31): 2'-O-methyl modified
  modified_base (32)..(32): 2'-O-methyl modified
  modified_base (33)..(33): 2'-O-methyl modified
  modified_base (34)..(34): 2'-O-methyl modified
  modified_base (35)..(35): 2'-O-methyl modified
  modified_base (36)..(36): 2'-O-methyl modified

SEQ ID NO: 1106 - RNA, 36 nt, Artificial Sequence; identical to SEQ ID NO: 926
  synthetic construct
  misc_feature (1)..(2): linked via phosphorothioate
  modified_base (1)..(1): 2'-O-methyl modified
  modified_base (2)..(2): 2'-O-methyl modified
  modified_base (3)..(3): 2'-O-methyl modified
  modified_base (4)..(4): 2'-O-methyl modified
  modified_base (5)..(5): 2'-O-methyl modified
  modified_base (6)..(6): 2'-O-methyl modified
  modified_base (7)..(7): 2'-O-methyl modified
  modified_base (8)..(8): 2'-fluoro modified
  modified_base (9)..(9): 2'-fluoro modified
  modified_base (10)..(10): 2'-fluoro modified
  modified_base (11)..(11): 2'-fluoro modified
  modified_base (12)..(12): 2'-O-methyl modified
  modified_base (13)..(13): 2'-O-methyl modified
  modified_base (14)..(14): 2'-O-methyl modified
  modified_base (15)..(15): 2'-O-methyl modified
  modified_base (16)..(16): 2'-O-methyl modified
  modified_base (17)..(17): 2'-O-methyl modified
  modified_base (18)..(18): 2'-O-methyl modified
  modified_base (19)..(19): 2'-O-methyl modified
  modified_base (20)..(20): 2'-O-methyl modified
  modified_base (21)..(21): 2'-O-methyl modified
  modified_base (22)..(22): 2'-O-methyl modified
  modified_base (23)..(23): 2'-O-methyl modified
  modified_base (24)..(24): 2'-O-methyl modified
  modified_base (25)..(25): 2'-O-methyl modified
  modified_base (26)..(26): 2'-O-methyl modified
  modified_base (27)..(27): 2'-O-methyl modified
  modified_base (28)..(28): GalNAc-conjugated
  modified_base (29)..(29): GalNAc-conjugated
  modified_base (30)..(30): GalNAc-conjugated
  modified_base (31)..(31): 2'-O-methyl modified
  modified_base (32)..(32): 2'-O-methyl modified
  modified_base (33)..(33): 2'-O-methyl modified
  modified_base (34)..(34): 2'-O-methyl modified
  modified_base (35)..(35): 2'-O-methyl modified
  modified_base (36)..(36): 2'-O-methyl modified

SEQ ID NO: 1107 - RNA, 36 nt, Artificial Sequence; identical to SEQ ID NO: 927
  synthetic construct
  misc_feature (1)..(2): linked via phosphorothioate
  modified_base (1)..(1): 2'-O-methyl modified
  modified_base (2)..(2): 2'-O-methyl modified
  modified_base (3)..(3): 2'-O-methyl modified
  modified_base (4)..(4): 2'-O-methyl modified
  modified_base (5)..(5): 2'-O-methyl modified
  modified_base (6)..(6): 2'-O-methyl modified
  modified_base (7)..(7): 2'-O-methyl modified
  modified_base (8)..(8): 2'-fluoro modified
  modified_base (9)..(9): 2'-fluoro modified
  modified_base (10)..(10): 2'-fluoro modified
  modified_base (11)..(11): 2'-fluoro modified
  modified_base (12)..(12): 2'-O-methyl modified
  modified_base (13)..(13): 2'-O-methyl modified
  modified_base (14)..(14): 2'-O-methyl modified
  modified_base (15)..(15): 2'-O-methyl modified
  modified_base (16)..(16): 2'-O-methyl modified
  modified_base (17)..(17): 2'-O-methyl modified
  modified_base (18)..(18): 2'-O-methyl modified
  modified_base (19)..(19): 2'-O-methyl modified
  modified_base (20)..(20): 2'-O-methyl modified
  modified_base (21)..(21): 2'-O-methyl modified
  modified_base (22)..(22): 2'-O-methyl modified
  modified_base (23)..(23): 2'-O-methyl modified
  modified_base (24)..(24): 2'-O-methyl modified
  modified_base (25)..(25): 2'-O-methyl modified
  modified_base (26)..(26): 2'-O-methyl modified
  modified_base (27)..(27): 2'-O-methyl modified
  modified_base (28)..(28): GalNAc-conjugated
  modified_base (29)..(29): GalNAc-conjugated
  modified_base (30)..(30): GalNAc-conjugated
  modified_base (31)..(31): 2'-O-methyl modified
  modified_base (32)..(32): 2'-O-methyl modified
  modified_base (33)..(33): 2'-O-methyl modified
  modified_base (34)..(34): 2'-O-methyl modified
  modified_base (35)..(35): 2'-O-methyl modified
  modified_base (36)..(36): 2'-O-methyl modified

SEQ ID NO: 1108 - RNA, 36 nt, Artificial Sequence; identical to SEQ ID NO: 928
  synthetic construct
  misc_feature (1)..(2): linked via phosphorothioate
  modified_base (1)..(1): 2'-O-methyl modified
  modified_base (2)..(2): 2'-O-methyl modified
  modified_base (3)..(3): 2'-O-methyl modified
  modified_base (4)..(4): 2'-O-methyl modified
  modified_base (5)..(5): 2'-O-methyl modified
  modified_base (6)..(6): 2'-O-methyl modified
  modified_base (7)..(7): 2'-O-methyl modified
  modified_base (8)..(8): 2'-fluoro modified
  modified_base (9)..(9): 2'-fluoro modified
  modified_base (10)..(10): 2'-fluoro modified
  modified_base (11)..(11): 2'-fluoro modified
  modified_base (12)..(12): 2'-O-methyl modified
  modified_base (13)..(13): 2'-O-methyl modified
  modified_base (14)..(14): 2'-O-methyl modified
  modified_base (15)..(15): 2'-O-methyl modified
  modified_base (16)..(16): 2'-O-methyl modified
  modified_base (17)..(17): 2'-O-methyl modified
  modified_base (18)..(18): 2'-O-methyl modified
  modified_base (19)..(19): 2'-O-methyl modified
  modified_base (20)..(20): 2'-O-methyl modified
  modified_base (21)..(21): 2'-O-methyl modified
  modified_base (22)..(22): 2'-O-methyl modified
  modified_base (23)..(23): 2'-O-methyl modified
  modified_base (24)..(24): 2'-O-methyl modified
  modified_base (25)..(25): 2'-O-methyl modified
  modified_base (26)..(26): 2'-O-methyl modified
  modified_base (27)..(27): 2'-O-methyl modified
  modified_base (28)..(28): GalNAc-conjugated
  modified_base (29)..(29): GalNAc-conjugated
  modified_base (30)..(30): GalNAc-conjugated
  modified_base (31)..(31): 2'-O-methyl modified
  modified_base (32)..(32): 2'-O-methyl modified
  modified_base (33)..(33): 2'-O-methyl modified
  modified_base (34)..(34): 2'-O-methyl modified
  modified_base (35)..(35): 2'-O-methyl modified
  modified_base (36)..(36): 2'-O-methyl modified

SEQ ID NO: 1109 - RNA, 36 nt, Artificial Sequence; identical to SEQ ID NO: 929
  synthetic construct
  misc_feature (1)..(2): linked via phosphorothioate
  modified_base (1)..(1): 2'-O-methyl modified
  modified_base (2)..(2): 2'-O-methyl modified
  modified_base (3)..(3): 2'-O-methyl modified
  modified_base (4)..(4): 2'-O-methyl modified
  modified_base (5)..(5): 2'-O-methyl modified
  modified_base (6)..(6): 2'-O-methyl modified
  modified_base (7)..(7): 2'-O-methyl modified
  modified_base (8)..(8): 2'-fluoro modified
  modified_base (9)..(9): 2'-fluoro modified
  modified_base (10)..(10): 2'-fluoro modified
  modified_base (11)..(11): 2'-fluoro modified
  modified_base (12)..(12): 2'-O-methyl modified
  modified_base (13)..(13): 2'-O-methyl modified
  modified_base (14)..(14): 2'-O-methyl modified
  modified_base (15)..(15): 2'-O-methyl modified
  modified_base (16)..(16): 2'-O-methyl modified
  modified_base (17)..(17): 2'-O-methyl modified
  modified_base (18)..(18): 2'-O-methyl modified
  modified_base (19)..(19): 2'-O-methyl modified
  modified_base (20)..(20): 2'-O-methyl modified
  modified_base (21)..(21): 2'-O-methyl modified
  modified_base (22)..(22): 2'-O-methyl modified
  modified_base (23)..(23): 2'-O-methyl modified
  modified_base (24)..(24): 2'-O-methyl modified
  modified_base (25)..(25): 2'-O-methyl modified
  modified_base (26)..(26): 2'-O-methyl modified
  modified_base (27)..(27): 2'-O-methyl modified
  modified_base (28)..(28): GalNAc-conjugated
  modified_base (29)..(29): GalNAc-conjugated
  modified_base (30)..(30): GalNAc-conjugated
  modified_base (31)..(31): 2'-O-methyl modified
  modified_base (32)..(32): 2'-O-methyl modified
  modified_base (33)..(33): 2'-O-methyl modified
  modified_base (34)..(34): 2'-O-methyl modified
  modified_base (35)..(35): 2'-O-methyl modified
  modified_base (36)..(36): 2'-O-methyl modified

SEQ ID NO: 1110 - RNA, 36 nt, Artificial Sequence; identical to SEQ ID NO: 930
  synthetic construct
  misc_feature (1)..(2): linked via phosphorothioate
  modified_base (1)..(1): 2'-O-methyl modified
  modified_base (2)..(2): 2'-O-methyl modified
  modified_base (3)..(3): 2'-O-methyl modified
  modified_base (4)..(4): 2'-O-methyl modified
  modified_base (5)..(5): 2'-O-methyl modified
  modified_base (6)..(6): 2'-O-methyl modified
  modified_base (7)..(7): 2'-O-methyl modified
  modified_base (8)..(8): 2'-fluoro modified
  modified_base (9)..(9): 2'-fluoro modified
  modified_base (10)..(10): 2'-fluoro modified
  modified_base (11)..(11): 2'-fluoro modified
  modified_base (12)..(12): 2'-O-methyl modified
  modified_base (13)..(13): 2'-O-methyl modified
  modified_base (14)..(14): 2'-O-methyl modified
  modified_base (15)..(15): 2'-O-methyl modified
  modified_base (16)..(16): 2'-O-methyl modified
  modified_base (17)..(17): 2'-O-methyl modified
  modified_base (18)..(18): 2'-O-methyl modified
  modified_base (19)..(19): 2'-O-methyl modified
  modified_base (20)..(20): 2'-O-methyl modified
  modified_base (21)..(21): 2'-O-methyl modified
  modified_base (22)..(22): 2'-O-methyl modified
  modified_base (23)..(23): 2'-O-methyl modified
  modified_base (24)..(24): 2'-O-methyl modified
  modified_base (25)..(25): 2'-O-methyl modified
  modified_base (26)..(26): 2'-O-methyl modified
  modified_base (27)..(27): 2'-O-methyl modified
  modified_base (28)..(28): GalNAc-conjugated
  modified_base (29)..(29): GalNAc-conjugated
  modified_base (30)..(30): GalNAc-conjugated
  modified_base (31)..(31): 2'-O-methyl modified
  modified_base (32)..(32): 2'-O-methyl modified
  modified_base (33)..(33): 2'-O-methyl modified
  modified_base (34)..(34): 2'-O-methyl modified
  modified_base (35)..(35): 2'-O-methyl modified
  modified_base (36)..(36): 2'-O-methyl modified

SEQ ID NO: 1111 - RNA, 36 nt, Artificial Sequence; identical to SEQ ID NO: 931
  synthetic construct
  misc_feature (1)..(2): linked via phosphorothioate
  modified_base (1)..(1): 2'-O-methyl modified
  modified_base (2)..(2): 2'-O-methyl modified
  modified_base (3)..(3): 2'-O-methyl modified
  modified_base (4)..(4): 2'-O-methyl modified
  modified_base (5)..(5): 2'-O-methyl modified
  modified_base (6)..(6): 2'-O-methyl modified
  modified_base (7)..(7): 2'-O-methyl modified
  modified_base (8)..(8): 2'-fluoro modified
  modified_base (9)..(9): 2'-fluoro modified
  modified_base (10)..(10): 2'-fluoro modified
  modified_base (11)..(11): 2'-fluoro modified
  modified_base (12)..(12): 2'-O-methyl modified
  modified_base (13)..(13): 2'-O-methyl modified
  modified_base (14)..(14): 2'-O-methyl modified
  modified_base (15)..(15): 2'-O-methyl modified
  modified_base (16)..(16): 2'-O-methyl modified
  modified_base (17)..(17): 2'-O-methyl modified
  modified_base (18)..(18): 2'-O-methyl modified
  modified_base (19)..(19): 2'-O-methyl modified
  modified_base (20)..(20): 2'-O-methyl modified
  modified_base (21)..(21): 2'-O-methyl modified
  modified_base (22)..(22): 2'-O-methyl modified
  modified_base (23)..(23): 2'-O-methyl modified
  modified_base (24)..(24): 2'-O-methyl modified
  modified_base (25)..(25): 2'-O-methyl modified
  modified_base (26)..(26): 2'-O-methyl modified
  modified_base (27)..(27): 2'-O-methyl modified
  modified_base (28)..(28): GalNAc-conjugated
  modified_base (29)..(29): GalNAc-conjugated
  modified_base (30)..(30): GalNAc-conjugated
  modified_base (31)..(31): 2'-O-methyl modified
  modified_base (32)..(32): 2'-O-methyl modified
  modified_base (33)..(33): 2'-O-methyl modified
  modified_base (34)..(34): 2'-O-methyl modified
  modified_base (35)..(35): 2'-O-methyl modified
  modified_base (36)..(36): 2'-O-methyl modified

SEQ ID NO: 1112 - RNA, 36 nt, Artificial Sequence; identical to SEQ ID NO: 932
  synthetic construct
  misc_feature (1)..(2): linked via phosphorothioate
  modified_base (1)..(1): 2'-O-methyl modified
  modified_base (2)..(2): 2'-O-methyl modified
  modified_base (3)..(3): 2'-O-methyl modified
  modified_base (4)..(4): 2'-O-methyl modified
  modified_base (5)..(5): 2'-O-methyl modified
  modified_base (6)..(6): 2'-O-methyl modified
  modified_base (7)..(7): 2'-O-methyl modified
  modified_base (8)..(8): 2'-fluoro modified
  modified_base (9)..(9): 2'-fluoro modified
  modified_base (10)..(10): 2'-fluoro modified
  modified_base (11)..(11): 2'-fluoro modified
  modified_base (12)..(12): 2'-O-methyl modified
  modified_base (13)..(13): 2'-O-methyl modified
  modified_base (14)..(14): 2'-O-methyl modified
  modified_base (15)..(15): 2'-O-methyl modified
  modified_base (16)..(16): 2'-O-methyl modified
  modified_base (17)..(17): 2'-O-methyl modified
  modified_base (18)..(18): 2'-O-methyl modified
  modified_base (19)..(19): 2'-O-methyl modified
  modified_base (20)..(20): 2'-O-methyl modified
  modified_base (21)..(21): 2'-O-methyl modified
  modified_base (22)..(22): 2'-O-methyl modified
  modified_base (23)..(23): 2'-O-methyl modified
  modified_base (24)..(24): 2'-O-methyl modified
  modified_base (25)..(25): 2'-O-methyl modified
  modified_base (26)..(26): 2'-O-methyl modified
  modified_base (27)..(27): 2'-O-methyl modified
  modified_base (28)..(28): GalNAc-conjugated
  modified_base (29)..(29): GalNAc-conjugated
  modified_base (30)..(30): GalNAc-conjugated
  modified_base (31)..(31): 2'-O-methyl modified
  modified_base (32)..(32): 2'-O-methyl modified
  modified_base (33)..(33): 2'-O-methyl modified
  modified_base (34)..(34): 2'-O-methyl modified
  modified_base (35)..(35): 2'-O-methyl modified
  modified_base (36)..(36): 2'-O-methyl modified

SEQ ID NO: 1113 - RNA, 36 nt, Artificial Sequence; identical to SEQ ID NO: 933
  synthetic construct
  misc_feature (1)..(2): linked via phosphorothioate
  modified_base (1)..(1): 2'-O-methyl modified
  modified_base (2)..(2): 2'-O-methyl modified
  modified_base (3)..(3): 2'-O-methyl modified
  modified_base (4)..(4): 2'-O-methyl modified
  modified_base (5)..(5): 2'-O-methyl modified
  modified_base (6)..(6): 2'-O-methyl modified
  modified_base (7)..(7): 2'-O-methyl modified
  modified_base (8)..(8): 2'-fluoro modified
  modified_base (9)..(9): 2'-fluoro modified
  modified_base (10)..(10): 2'-fluoro modified
  modified_base (11)..(11): 2'-fluoro modified
  modified_base (12)..(12): 2'-O-methyl modified
  modified_base (13)..(13): 2'-O-methyl modified
  modified_base (14)..(14): 2'-O-methyl modified
  modified_base (15)..(15): 2'-O-methyl modified
  modified_base (16)..(16): 2'-O-methyl modified
  modified_base (17)..(17): 2'-O-methyl modified
  modified_base (18)..(18): 2'-O-methyl modified
  modified_base (19)..(19): 2'-O-methyl modified
  modified_base (20)..(20): 2'-O-methyl modified
  modified_base (21)..(21): 2'-O-methyl modified
  modified_base (22)..(22): 2'-O-methyl modified
  modified_base (23)..(23): 2'-O-methyl modified
  modified_base (24)..(24): 2'-O-methyl modified
  modified_base (25)..(25): 2'-O-methyl modified
  modified_base (26)..(26): 2'-O-methyl modified
  modified_base (27)..(27): 2'-O-methyl modified
  modified_base (28)..(28): GalNAc-conjugated
  modified_base (29)..(29): GalNAc-conjugated
  modified_base (30)..(30): GalNAc-conjugated
  modified_base (31)..(31): 2'-O-methyl modified
  modified_base (32)..(32): 2'-O-methyl modified
  modified_base (33)..(33): 2'-O-methyl modified
  modified_base (34)..(34): 2'-O-methyl modified
  modified_base (35)..(35): 2'-O-methyl modified
  modified_base (36)..(36): 2'-O-methyl modified

SEQ ID NO: 1114 - RNA, 36 nt, Artificial Sequence; identical to SEQ ID NO: 934
  synthetic construct
  misc_feature (1)..(2): linked via phosphorothioate
  modified_base (1)..(1): 2'-O-methyl modified
  modified_base (2)..(2): 2'-O-methyl modified
  modified_base (3)..(3): 2'-O-methyl modified
  modified_base (4)..(4): 2'-O-methyl modified
  modified_base (5)..(5): 2'-O-methyl modified
  modified_base (6)..(6): 2'-O-methyl modified
  modified_base (7)..(7): 2'-O-methyl modified
  modified_base (8)..(8): 2'-fluoro modified
  modified_base (9)..(9): 2'-fluoro modified
  modified_base (10)..(10): 2'-fluoro modified
  modified_base (11)..(11): 2'-fluoro modified
  modified_base (12)..(12): 2'-O-methyl modified
  modified_base (13)..(13): 2'-O-methyl modified
  modified_base (14)..(14): 2'-O-methyl modified
  modified_base (15)..(15): 2'-O-methyl modified
  modified_base (16)..(16): 2'-O-methyl modified
  modified_base (17)..(17): 2'-O-methyl modified
  modified_base (18)..(18): 2'-O-methyl modified
  modified_base (19)..(19): 2'-O-methyl modified
  modified_base (20)..(20): 2'-O-methyl modified
  modified_base (21)..(21): 2'-O-methyl modified
  modified_base (22)..(22): 2'-O-methyl modified
  modified_base (23)..(23): 2'-O-methyl modified
  modified_base (24)..(24): 2'-O-methyl modified
  modified_base (25)..(25): 2'-O-methyl modified
  modified_base (26)..(26): 2'-O-methyl modified
  modified_base (27)..(27): 2'-O-methyl modified
  modified_base (28)..(28): GalNAc-conjugated
  modified_base (29)..(29): GalNAc-conjugated
  modified_base (30)..(30): GalNAc-conjugated
  modified_base (31)..(31): 2'-O-methyl modified
  modified_base (32)..(32): 2'-O-methyl modified
  modified_base (33)..(33): 2'-O-methyl modified
  modified_base (34)..(34): 2'-O-methyl modified
  modified_base (35)..(35): 2'-O-methyl modified
  modified_base (36)..(36): 2'-O-methyl modified

SEQ ID NO: 1115 - RNA, 36 nt, Artificial Sequence; identical to SEQ ID NO: 935
  synthetic construct
  misc_feature (1)..(2): linked via phosphorothioate
  modified_base (1)..(1): 2'-O-methyl modified
  modified_base (2)..(2): 2'-O-methyl modified
  modified_base (3)..(3): 2'-O-methyl modified
  modified_base (4)..(4): 2'-O-methyl modified
  modified_base (5)..(5): 2'-O-methyl modified
  modified_base (6)..(6): 2'-O-methyl modified
  modified_base (7)..(7): 2'-O-methyl modified
  modified_base (8)..(8): 2'-fluoro modified
  modified_base (9)..(9): 2'-fluoro modified
  modified_base (10)..(10): 2'-fluoro modified
  modified_base (11)..(11): 2'-fluoro modified
  modified_base (12)..(12): 2'-O-methyl modified
  modified_base (13)..(13): 2'-O-methyl modified
  modified_base (14)..(14): 2'-O-methyl modified
  modified_base (15)..(15): 2'-O-methyl modified
  modified_base (16)..(16): 2'-O-methyl modified
  modified_base (17)..(17): 2'-O-methyl modified
  modified_base (18)..(18): 2'-O-methyl modified
  modified_base (19)..(19): 2'-O-methyl modified
  modified_base (20)..(20): 2'-O-methyl modified
  modified_base (21)..(21): 2'-O-methyl modified
  modified_base (22)..(22): 2'-O-methyl modified
  modified_base (23)..(23): 2'-O-methyl modified
  modified_base (24)..(24): 2'-O-methyl modified
  modified_base (25)..(25): 2'-O-methyl modified
  modified_base (26)..(26): 2'-O-methyl modified
  modified_base (27)..(27): 2'-O-methyl modified
  modified_base (28)..(28): GalNAc-conjugated
  modified_base (29)..(29): GalNAc-conjugated
  modified_base (30)..(30): GalNAc-conjugated
  modified_base (31)..(31): 2'-O-methyl modified
  modified_base (32)..(32): 2'-O-methyl modified
  modified_base (33)..(33): 2'-O-methyl modified
  modified_base (34)..(34): 2'-O-methyl modified
  modified_base (35)..(35): 2'-O-methyl modified
  modified_base (36)..(36): 2'-O-methyl modified

SEQ ID NO: 1116 - RNA, 36 nt, Artificial Sequence; identical to SEQ ID NO: 936
  synthetic construct
  misc_feature (1)..(2): linked via phosphorothioate
  modified_base (1)..(1): 2'-O-methyl modified
  modified_base (2)..(2): 2'-O-methyl modified
  modified_base (3)..(3): 2'-O-methyl modified
  modified_base (4)..(4): 2'-O-methyl modified
  modified_base (5)..(5): 2'-O-methyl modified
  modified_base (6)..(6): 2'-O-methyl modified
  modified_base (7)..(7): 2'-O-methyl modified
  modified_base (8)..(8): 2'-fluoro modified
  modified_base (9)..(9): 2'-fluoro modified
  modified_base (10)..(10): 2'-fluoro modified
  modified_base (11)..(11): 2'-fluoro modified
  modified_base (12)..(12): 2'-O-methyl modified
  modified_base (13)..(13): 2'-O-methyl modified
  modified_base (14)..(14): 2'-O-methyl modified
  modified_base (15)..(15): 2'-O-methyl modified
  modified_base (16)..(16): 2'-O-methyl modified
  modified_base (17)..(17): 2'-O-methyl modified
  modified_base (18)..(18): 2'-O-methyl modified
  modified_base (19)..(19): 2'-O-methyl modified
  modified_base (20)..(20): 2'-O-methyl modified
  modified_base (21)..(21): 2'-O-methyl modified
  modified_base (22)..(22): 2'-O-methyl modified
  modified_base (23)..(23): 2'-O-methyl modified
  modified_base (24)..(24): 2'-O-methyl modified
  modified_base (25)..(25): 2'-O-methyl modified
  modified_base (26)..(26): 2'-O-methyl modified
  modified_base (27)..(27): 2'-O-methyl modified
  modified_base (28)..(28): GalNAc-conjugated
  modified_base (29)..(29): GalNAc-conjugated
  modified_base (30)..(30): GalNAc-conjugated
  modified_base (31)..(31): 2'-O-methyl modified
  modified_base (32)..(32): 2'-O-methyl modified
  modified_base (33)..(33): 2'-O-methyl modified
  modified_base (34)..(34): 2'-O-methyl modified
  modified_base (35)..(35): 2'-O-methyl modified
  modified_base (36)..(36): 2'-O-methyl modified

SEQ ID NO: 1117 - RNA, 36 nt, Artificial Sequence; identical to SEQ ID NO: 937
  synthetic construct
  misc_feature (1)..(2): linked via phosphorothioate
  modified_base (1)..(1): 2'-O-methyl modified
  modified_base (2)..(2): 2'-O-methyl modified
  modified_base (3)..(3): 2'-O-methyl modified
  modified_base (4)..(4): 2'-O-methyl modified
  modified_base (5)..(5): 2'-O-methyl modified
  modified_base (6)..(6): 2'-O-methyl modified
  modified_base (7)..(7): 2'-O-methyl modified
  modified_base (8)..(8): 2'-fluoro modified
  modified_base (9)..(9): 2'-fluoro modified
  modified_base (10)..(10): 2'-fluoro modified
  modified_base (11)..(11): 2'-fluoro modified
  modified_base (12)..(12): 2'-O-methyl modified
  modified_base (13)..(13): 2'-O-methyl modified
  modified_base (14)..(14): 2'-O-methyl modified
  modified_base (15)..(15): 2'-O-methyl modified
  modified_base (16)..(16): 2'-O-methyl modified
  modified_base (17)..(17): 2'-O-methyl modified
  modified_base (18)..(18): 2'-O-methyl modified
  modified_base (19)..(19): 2'-O-methyl modified
  modified_base (20)..(20): 2'-O-methyl modified
  modified_base (21)..(21): 2'-O-methyl modified
  modified_base (22)..(22): 2'-O-methyl modified
  modified_base (23)..(23): 2'-O-methyl modified
  modified_base (24)..(24): 2'-O-methyl modified
  modified_base (25)..(25): 2'-O-methyl modified
  modified_base (26)..(26): 2'-O-methyl modified
  modified_base (27)..(27): 2'-O-methyl modified
  modified_base (28)..(28): GalNAc-conjugated
  modified_base (29)..(29): GalNAc-conjugated
  modified_base (30)..(30): GalNAc-conjugated
  modified_base (31)..(31): 2'-O-methyl modified
  modified_base (32)..(32): 2'-O-methyl modified
  modified_base (33)..(33): 2'-O-methyl modified
  modified_base (34)..(34): 2'-O-methyl modified
  modified_base (35)..(35): 2'-O-methyl modified
  modified_base (36)..(36): 2'-O-methyl modified

SEQ ID NO: 1118 - RNA, 36 nt, Artificial Sequence; identical to SEQ ID NO: 938
  synthetic construct
  misc_feature (1)..(2): linked via phosphorothioate
  modified_base (1)..(1): 2'-O-methyl modified
  modified_base (2)..(2): 2'-O-methyl modified
  modified_base (3)..(3): 2'-O-methyl modified
  modified_base (4)..(4): 2'-O-methyl modified
  modified_base (5)..(5): 2'-O-methyl modified
  modified_base (6)..(6): 2'-O-methyl modified
  modified_base (7)..(7): 2'-O-methyl modified
  modified_base (8)..(8): 2'-fluoro modified
  modified_base (9)..(9): 2'-fluoro modified
  modified_base (10)..(10): 2'-fluoro modified
  modified_base (11)..(11): 2'-fluoro modified
  modified_base (12)..(12): 2'-O-methyl modified
  modified_base (13)..(13): 2'-O-methyl modified
  modified_base (14)..(14): 2'-O-methyl modified
  modified_base (15)..(15): 2'-O-methyl modified
  modified_base (16)..(16): 2'-O-methyl modified
  modified_base (17)..(17): 2'-O-methyl modified
  modified_base (18)..(18): 2'-O-methyl modified
  modified_base (19)..(19): 2'-O-methyl modified
  modified_base (20)..(20): 2'-O-methyl modified
  modified_base (21)..(21): 2'-O-methyl modified
  modified_base (22)..(22): 2'-O-methyl modified
  modified_base (23)..(23): 2'-O-methyl modified
  modified_base (24)..(24): 2'-O-methyl modified
  modified_base (25)..(25): 2'-O-methyl modified
  modified_base (26)..(26): 2'-O-methyl modified
  modified_base (27)..(27): 2'-O-methyl modified
  modified_base (28)..(28): GalNAc-conjugated
  modified_base (29)..(29): GalNAc-conjugated
  modified_base (30)..(30): GalNAc-conjugated
  modified_base (31)..(31): 2'-O-methyl modified
  modified_base (32)..(32): 2'-O-methyl modified
  modified_base (33)..(33): 2'-O-methyl modified
  modified_base (34)..(34): 2'-O-methyl modified
  modified_base (35)..(35): 2'-O-methyl modified
  modified_base (36)..(36): 2'-O-methyl modified

SEQ ID NO: 1119 - RNA, 36 nt, Artificial Sequence; identical to SEQ ID NO: 939
  synthetic construct
  misc_feature (1)..(2): linked via phosphorothioate
  modified_base (1)..(1): 2'-O-methyl modified
  modified_base (2)..(2): 2'-O-methyl modified
  modified_base (3)..(3): 2'-O-methyl modified
  modified_base (4)..(4): 2'-O-methyl modified
  modified_base (5)..(5): 2'-O-methyl modified
  modified_base (6)..(6): 2'-O-methyl modified
  modified_base (7)..(7): 2'-O-methyl modified
  modified_base (8)..(8): 2'-fluoro modified
  modified_base (9)..(9): 2'-fluoro modified
  modified_base (10)..(10): 2'-fluoro modified
  modified_base (11)..(11): 2'-fluoro modified
  modified_base (12)..(12): 2'-O-methyl modified
  modified_base (13)..(13): 2'-O-methyl modified
  modified_base (14)..(14): 2'-O-methyl modified
  modified_base (15)..(15): 2'-O-methyl modified
  modified_base (16)..(16): 2'-O-methyl modified
  modified_base (17)..(17): 2'-O-methyl modified
  modified_base (18)..(18): 2'-O-methyl modified
  modified_base (19)..(19): 2'-O-methyl modified
  modified_base (20)..(20): 2'-O-methyl modified
  modified_base (21)..(21): 2'-O-methyl modified
  modified_base (22)..(22): 2'-O-methyl modified
  modified_base (23)..(23): 2'-O-methyl modified
  modified_base (24)..(24): 2'-O-methyl modified
  modified_base (25)..(25): 2'-O-methyl modified
  modified_base (26)..(26): 2'-O-methyl modified
  modified_base (27)..(27): 2'-O-methyl modified
  modified_base (28)..(28): GalNAc-conjugated
  modified_base (29)..(29): GalNAc-conjugated
  modified_base (30)..(30): GalNAc-conjugated
  modified_base (31)..(31): 2'-O-methyl modified
  modified_base (32)..(32): 2'-O-methyl modified
  modified_base (33)..(33): 2'-O-methyl modified
  modified_base (34)..(34): 2'-O-methyl modified
  modified_base (35)..(35): 2'-O-methyl modified
  modified_base (36)..(36): 2'-O-methyl modified

SEQ ID NO: 1120 - RNA, 36 nt, Artificial Sequence; identical to SEQ ID NO: 940
  synthetic construct
  misc_feature (1)..(2): linked via phosphorothioate
  modified_base (1)..(1): 2'-O-methyl modified
  modified_base (2)..(2): 2'-O-methyl modified
  modified_base (3)..(3): 2'-O-methyl modified
  modified_base (4)..(4): 2'-O-methyl modified
  modified_base (5)..(5): 2'-O-methyl modified
  modified_base (6)..(6): 2'-O-methyl modified
  modified_base (7)..(7): 2'-O-methyl modified
  modified_base (8)..(8): 2'-fluoro modified
  modified_base (9)..(9): 2'-fluoro modified
  modified_base (10)..(10): 2'-fluoro modified
  modified_base (11)..(11): 2'-fluoro modified
  modified_base (12)..(12): 2'-O-methyl modified
  modified_base (13)..(13): 2'-O-methyl modified
  modified_base (14)..(14): 2'-O-methyl modified
  modified_base (15)..(15): 2'-O-methyl modified
  modified_base (16)..(16): 2'-O-methyl modified
  modified_base (17)..(17): 2'-O-methyl modified
  modified_base (18)..(18): 2'-O-methyl modified
  modified_base (19)..(19): 2'-O-methyl modified
  modified_base (20)..(20): 2'-O-methyl modified
  modified_base (21)..(21): 2'-O-methyl modified
  modified_base (22)..(22): 2'-O-methyl modified
  modified_base (23)..(23): 2'-O-methyl modified
  modified_base (24)..(24): 2'-O-methyl modified
  modified_base (25)..(25): 2'-O-methyl modified
  modified_base (26)..(26): 2'-O-methyl modified
  modified_base (27)..(27): 2'-O-methyl modified
  modified_base (28)..(28): GalNAc-conjugated
  modified_base (29)..(29): GalNAc-conjugated
  modified_base (30)..(30): GalNAc-conjugated
  modified_base (31)..(31): 2'-O-methyl modified
  modified_base (32)..(32): 2'-O-methyl modified
  modified_base (33)..(33): 2'-O-methyl modified
  modified_base (34)..(34): 2'-O-methyl modified
  modified_base (35)..(35): 2'-O-methyl modified
  modified_base (36)..(36): 2'-O-methyl modified

SEQ ID NO: 1121 - RNA, 36 nt, Artificial Sequence; identical to SEQ ID NO: 941
  synthetic construct
  misc_feature (1)..(2): linked via phosphorothioate
  modified_base (1)..(1): 2'-O-methyl modified
  modified_base (2)..(2): 2'-O-methyl modified
  modified_base (3)..(3): 2'-O-methyl modified
  modified_base (4)..(4): 2'-O-methyl modified
  modified_base (5)..(5): 2'-O-methyl modified
  modified_base (6)..(6): 2'-O-methyl modified
  modified_base (7)..(7): 2'-O-methyl modified
  modified_base (8)..(8): 2'-fluoro modified
  modified_base (9)..(9): 2'-fluoro modified
  modified_base (10)..(10): 2'-fluoro modified
  modified_base (11)..(11): 2'-fluoro modified
  modified_base (12)..(12): 2'-O-methyl modified
  modified_base (13)..(13): 2'-O-methyl modified
  modified_base (14)..(14): 2'-O-methyl modified
  modified_base (15)..(15): 2'-O-methyl modified
  modified_base (16)..(16): 2'-O-methyl modified
  modified_base (17)..(17): 2'-O-methyl modified
  modified_base (18)..(18): 2'-O-methyl modified
  modified_base (19)..(19): 2'-O-methyl modified
  modified_base (20)..(20): 2'-O-methyl modified
  modified_base (21)..(21): 2'-O-methyl modified
  modified_base (22)..(22): 2'-O-methyl modified
  modified_base (23)..(23): 2'-O-methyl modified
  modified_base (24)..(24): 2'-O-methyl modified
  modified_base (25)..(25): 2'-O-methyl modified
  modified_base (26)..(26): 2'-O-methyl modified
  modified_base (27)..(27): 2'-O-methyl modified
  modified_base (28)..(28): GalNAc-conjugated
  modified_base (29)..(29): GalNAc-conjugated
  modified_base (30)..(30): GalNAc-conjugated
  modified_base (31)..(31): 2'-O-methyl modified
  modified_base (32)..(32): 2'-O-methyl modified
  modified_base (33)..(33): 2'-O-methyl modified
  modified_base (34)..(34): 2'-O-methyl modified
  modified_base (35)..(35): 2'-O-methyl modified
  modified_base (36)..(36): 2'-O-methyl modified

SEQ ID NO: 1122 - RNA, 36 nt, Artificial Sequence; identical to SEQ ID NO: 942
  synthetic construct
  misc_feature (1)..(2): linked via phosphorothioate
  modified_base (1)..(1): 2'-O-methyl modified
  modified_base (2)..(2): 2'-O-methyl modified
  modified_base (3)..(3): 2'-O-methyl modified
  modified_base (4)..(4): 2'-O-methyl modified
  modified_base (5)..(5): 2'-O-methyl modified
  modified_base (6)..(6): 2'-O-methyl modified
  modified_base (7)..(7): 2'-O-methyl modified
  modified_base (8)..(8): 2'-fluoro modified
  modified_base (9)..(9): 2'-fluoro modified
  modified_base (10)..(10): 2'-fluoro modified
  modified_base (11)..(11): 2'-fluoro modified
  modified_base (12)..(12): 2'-O-methyl modified
  modified_base (13)..(13): 2'-O-methyl modified
  modified_base (14)..(14): 2'-O-methyl modified
  modified_base (15)..(15): 2'-O-methyl modified
  modified_base (16)..(16): 2'-O-methyl modified
  modified_base (17)..(17): 2'-O-methyl modified
  modified_base (18)..(18): 2'-O-methyl modified
  modified_base (19)..(19): 2'-O-methyl modified
  modified_base (20)..(20): 2'-O-methyl modified
  modified_base (21)..(21): 2'-O-methyl modified
  modified_base (22)..(22): 2'-O-methyl modified
  modified_base (23)..(23): 2'-O-methyl modified
  modified_base (24)..(24): 2'-O-methyl modified
  modified_base (25)..(25): 2'-O-methyl modified
  modified_base (26)..(26): 2'-O-methyl modified
  modified_base (27)..(27): 2'-O-methyl modified
  modified_base (28)..(28): GalNAc-conjugated
  modified_base (29)..(29): GalNAc-conjugated
  modified_base (30)..(30): GalNAc-conjugated
  modified_base (31)..(31): 2'-O-methyl modified
  modified_base (32)..(32): 2'-O-methyl modified
  modified_base (33)..(33): 2'-O-methyl modified
  modified_base (34)..(34): 2'-O-methyl modified
  modified_base (35)..(35): 2'-O-methyl modified
  modified_base (36)..(36): 2'-O-methyl modified

SEQ ID NO: 1123 - RNA, 36 nt, Artificial Sequence; identical to SEQ ID NO: 943
  synthetic construct
  misc_feature (1)..(2): linked via phosphorothioate
  modified_base (1)..(1): 2'-O-methyl modified
  modified_base (2)..(2): 2'-O-methyl modified
  modified_base (3)..(3): 2'-O-methyl modified
  modified_base (4)..(4): 2'-O-methyl modified
  modified_base (5)..(5): 2'-O-methyl modified
  modified_base (6)..(6): 2'-O-methyl modified
  modified_base (7)..(7): 2'-O-methyl modified
  modified_base (8)..(8): 2'-fluoro modified
  modified_base (9)..(9): 2'-fluoro modified
  modified_base (10)..(10): 2'-fluoro modified
  modified_base (11)..(11): 2'-fluoro modified
  modified_base (12)..(12): 2'-O-methyl modified
  modified_base (13)..(13): 2'-O-methyl modified
  modified_base (14)..(14): 2'-O-methyl modified
  modified_base (15)..(15): 2'-O-methyl modified
  modified_base (16)..(16): 2'-O-methyl modified
  modified_base (17)..(17): 2'-O-methyl modified
  modified_base (18)..(18): 2'-O-methyl modified
  modified_base (19)..(19): 2'-O-methyl modified
  modified_base (20)..(20): 2'-O-methyl modified
  modified_base (21)..(21): 2'-O-methyl modified
  modified_base (22)..(22): 2'-O-methyl modified
  modified_base (23)..(23): 2'-O-methyl modified
  modified_base (24)..(24): 2'-O-methyl modified
  modified_base (25)..(25): 2'-O-methyl modified
  modified_base (26)..(26): 2'-O-methyl modified
  modified_base (27)..(27): 2'-O-methyl modified
  modified_base (28)..(28): GalNAc-conjugated
  modified_base (29)..(29): GalNAc-conjugated
  modified_base (30)..(30): GalNAc-conjugated
  modified_base (31)..(31): 2'-O-methyl modified
  modified_base (32)..(32): 2'-O-methyl modified
  modified_base (33)..(33): 2'-O-methyl modified
  modified_base (34)..(34): 2'-O-methyl modified
  modified_base (35)..(35): 2'-O-methyl modified
  modified_base (36)..(36): 2'-O-methyl modified

SEQ ID NO: 1124 - RNA, 36 nt, Artificial Sequence; identical to SEQ ID NO: 944
  synthetic construct
  misc_feature (1)..(2): linked via phosphorothioate
  modified_base (1)..(1): 2'-O-methyl modified
  modified_base (2)..(2): 2'-O-methyl modified
  modified_base (3)..(3): 2'-O-methyl modified
  modified_base (4)..(4): 2'-O-methyl modified
  modified_base (5)..(5): 2'-O-methyl modified
  modified_base (6)..(6): 2'-O-methyl modified
  modified_base (7)..(7): 2'-O-methyl modified
  modified_base (8)..(8): 2'-fluoro modified
  modified_base (9)..(9): 2'-fluoro modified
  modified_base (10)..(10): 2'-fluoro modified
  modified_base (11)..(11): 2'-fluoro modified
  modified_base (12)..(12): 2'-O-methyl modified
  modified_base (13)..(13): 2'-O-methyl modified
  modified_base (14)..(14): 2'-O-methyl modified
  modified_base (15)..(15): 2'-O-methyl modified
  modified_base (16)..(16): 2'-O-methyl modified
  modified_base (17)..(17): 2'-O-methyl modified
  modified_base (18)..(18): 2'-O-methyl modified
  modified_base (19)..(19): 2'-O-methyl modified
  modified_base (20)..(20): 2'-O-methyl modified
  modified_base (21)..(21): 2'-O-methyl modified
  modified_base (22)..(22): 2'-O-methyl modified
  modified_base (23)..(23): 2'-O-methyl modified
  modified_base (24)..(24): 2'-O-methyl modified
  modified_base (25)..(25): 2'-O-methyl modified
  modified_base (26)..(26): 2'-O-methyl modified
  modified_base (27)..(27): 2'-O-methyl modified
  modified_base (28)..(28): GalNAc-conjugated
  modified_base (29)..(29): GalNAc-conjugated
  modified_base (30)..(30): GalNAc-conjugated
  modified_base (31)..(31): 2'-O-methyl modified
  modified_base (32)..(32): 2'-O-methyl modified
  modified_base (33)..(33): 2'-O-methyl modified
  modified_base (34)..(34): 2'-O-methyl modified
  modified_base (35)..(35): 2'-O-methyl modified
  modified_base (36)..(36): 2'-O-methyl modified

SEQ ID NO: 1125 - RNA, 36 nt, Artificial Sequence; identical to SEQ ID NO: 945
  synthetic construct
  misc_feature (1)..(2): linked via phosphorothioate
  modified_base (1)..(1): 2'-O-methyl modified
  modified_base (2)..(2): 2'-O-methyl modified
  modified_base (3)..(3): 2'-O-methyl modified
  modified_base (4)..(4): 2'-O-methyl modified
  modified_base (5)..(5): 2'-O-methyl modified
  modified_base (6)..(6): 2'-O-methyl modified
  modified_base (7)..(7): 2'-O-methyl modified
  modified_base (8)..(8): 2'-fluoro modified
  modified_base (9)..(9): 2'-fluoro modified
  modified_base (10)..(10): 2'-fluoro modified
  modified_base (11)..(11): 2'-fluoro modified
  modified_base (12)..(12): 2'-O-methyl modified
  modified_base (13)..(13): 2'-O-methyl modified
  modified_base (14)..(14): 2'-O-methyl modified
  modified_base (15)..(15): 2'-O-methyl modified
  modified_base (16)..(16): 2'-O-methyl modified
  modified_base (17)..(17): 2'-O-methyl modified
  modified_base (18)..(18): 2'-O-methyl modified
  modified_base (19)..(19): 2'-O-methyl modified
  modified_base (20)..(20): 2'-O-methyl modified
  modified_base (21)..(21): 2'-O-methyl modified
  modified_base (22)..(22): 2'-O-methyl modified
  modified_base (23)..(23): 2'-O-methyl modified
  modified_base (24)..(24): 2'-O-methyl modified
  modified_base (25)..(25): 2'-O-methyl modified
  modified_base (26)..(26): 2'-O-methyl modified
  modified_base (27)..(27): 2'-O-methyl modified
  modified_base (28)..(28): GalNAc-conjugated
  modified_base (29)..(29): GalNAc-conjugated
  modified_base (30)..(30): GalNAc-conjugated
  modified_base (31)..(31): 2'-O-methyl modified
  modified_base (32)..(32): 2'-O-methyl modified
  modified_base (33)..(33): 2'-O-methyl modified
  modified_base (34)..(34): 2'-O-methyl modified
  modified_base (35)..(35): 2'-O-methyl modified
  modified_base (36)..(36): 2'-O-methyl modified

SEQ ID NO: 1126 - RNA, 36 nt, Artificial Sequence; identical to SEQ ID NO: 946
  synthetic construct
  misc_feature (1)..(2): linked via phosphorothioate
  modified_base (1)..(1): 2'-O-methyl modified
  modified_base (2)..(2): 2'-O-methyl modified
  modified_base (3)..(3): 2'-O-methyl modified
  modified_base (4)..(4): 2'-O-methyl modified
  modified_base (5)..(5): 2'-O-methyl modified
  modified_base (6)..(6): 2'-O-methyl modified
  modified_base (7)..(7): 2'-O-methyl modified
  modified_base (8)..(8): 2'-fluoro modified
  modified_base (9)..(9): 2'-fluoro modified
  modified_base (10)..(10): 2'-fluoro modified
  modified_base (11)..(11): 2'-fluoro modified
  modified_base (12)..(12): 2'-O-methyl modified
  modified_base (13)..(13): 2'-O-methyl modified
  modified_base (14)..(14): 2'-O-methyl modified
  modified_base (15)..(15): 2'-O-methyl modified
  modified_base (16)..(16): 2'-O-methyl modified
  modified_base (17)..(17): 2'-O-methyl modified
  modified_base (18)..(18): 2'-O-methyl modified
  modified_base (19)..(19): 2'-O-methyl modified
  modified_base (20)..(20): 2'-O-methyl modified
  modified_base (21)..(21): 2'-O-methyl modified
  modified_base (22)..(22): 2'-O-methyl modified
  modified_base (23)..(23): 2'-O-methyl modified
  modified_base (24)..(24): 2'-O-methyl modified
  modified_base (25)..(25): 2'-O-methyl modified
  modified_base (26)..(26): 2'-O-methyl modified
  modified_base (27)..(27): 2'-O-methyl modified
  modified_base (28)..(28): GalNAc-conjugated
  modified_base (29)..(29): GalNAc-conjugated
  modified_base (30)..(30): GalNAc-conjugated
  modified_base (31)..(31): 2'-O-methyl modified
  modified_base (32)..(32): 2'-O-methyl modified
  modified_base (33)..(33): 2'-O-methyl modified
  modified_base (34)..(34): 2'-O-methyl modified
  modified_base (35)..(35): 2'-O-methyl modified
  modified_base (36)..(36): 2'-O-methyl modified

SEQ ID NO: 1127 - RNA, 22 nt, Artificial Sequence
  synthetic construct
  misc_feature (1)..(4): linked via phosphorothioate
  modified_base (1)..(1): 5'-methoxyphosphonate-4-oxy modified
  modified_base (2)..(2): 2'-fluoro modified
  modified_base (3)..(3): 2'-fluoro modified
  modified_base (4)..(4): 2'-fluoro modified
  modified_base (5)..(5): 2'-fluoro modified
  modified_base (6)..(6): 2'-O-methyl modified
  modified_base (7)..(7): 2'-fluoro modified
  modified_base (8)..(8): 2'-O-methyl modified
  modified_base (9)..(9): 2'-O-methyl modified
  modified_base (10)..(10): 2'-fluoro modified
  modified_base (11)..(11): 2'-O-methyl modified
  modified_base (12)..(12): 2'-O-methyl modified
  modified_base (13)..(13): 2'-O-methyl modified
  modified_base (14)..(14): 2'-fluoro modified
  modified_base (15)..(15): 2'-O-methyl modified
  modified_base (16)..(16): 2'-O-methyl modified
  modified_base (17)..(17): 2'-O-methyl modified
  modified_base (18)..(18): 2'-O-methyl modified
  modified_base (19)..(19): 2'-O-methyl modified
  misc_feature (20)..(22): linked via phosphorothioate
  modified_base (20)..(20): 2'-O-methyl modified
  modified_base (21)..(21): 2'-O-methyl modified
  modified_base (22)..(22): 2'-O-methyl modified
ugaaaucaaagucauccugggg

SEQ ID NO: 1128 - RNA, 22 nt, Artificial Sequence
  synthetic construct
  misc_feature (1)..(4): linked via phosphorothioate
  modified_base (1)..(1): 5'-methoxyphosphonate-4-oxy modified
  modified_base (2)..(2): 2'-fluoro modified
  modified_base (3)..(3): 2'-fluoro modified
  modified_base (4)..(4): 2'-fluoro modified
  modified_base (5)..(5): 2'-fluoro modified
  modified_base (6)..(6): 2'-O-methyl modified
  modified_base (7)..(7): 2'-fluoro modified
  modified_base (8)..(8): 2'-O-methyl modified
  modified_base (9)..(9): 2'-O-methyl modified
  modified_base (10)..(10): 2'-fluoro modified
  modified_base (11)..(11): 2'-O-methyl modified
  modified_base (12)..(12): 2'-O-methyl modified
  modified_base (13)..(13): 2'-O-methyl modified
  modified_base (14)..(14): 2'-fluoro modified
  modified_base (15)..(15): 2'-O-methyl modified
  modified_base (16)..(16): 2'-O-methyl modified
  modified_base (17)..(17): 2'-O-methyl modified
  modified_base (18)..(18): 2'-O-methyl modified
  modified_base (19)..(19): 2'-O-methyl modified
  misc_feature (20)..(22): linked via phosphorothioate
  modified_base (20)..(20): 2'-O-methyl modified
  modified_base (21)..(21): 2'-O-methyl modified
  modified_base (22)..(22): 2'-O-methyl modified
uugaaaucaaagucauccuggg

SEQ ID NO: 1129 - RNA, 22 nt, Artificial Sequence
  synthetic construct
  misc_feature (1)..(4): linked via phosphorothioate
  modified_base (1)..(1): 5'-methoxyphosphonate-4-oxy modified
  modified_base (2)..(2): 2'-fluoro modified
  modified_base (3)..(3): 2'-fluoro modified
  modified_base (4)..(4): 2'-fluoro modified
  modified_base (5)..(5): 2'-fluoro modified
  modified_base (6)..(6): 2'-O-methyl modified
  modified_base (7)..(7): 2'-fluoro modified
  modified_base (8)..(8): 2'-O-methyl modified
  modified_base (9)..(9): 2'-O-methyl modified
  modified_base (10)..(10): 2'-fluoro modified
  modified_base (11)..(11): 2'-O-methyl modified
  modified_base (12)..(12): 2'-O-methyl modified
  modified_base (13)..(13): 2'-O-methyl modified
  modified_base (14)..(14): 2'-fluoro modified
  modified_base (15)..(15): 2'-O-methyl modified
  modified_base (16)..(16): 2'-O-methyl modified
  modified_base (17)..(17): 2'-O-methyl modified
  modified_base (18)..(18): 2'-O-methyl modified
  modified_base (19)..(19): 2'-O-methyl modified
  misc_feature (20)..(22): linked via phosphorothioate
  modified_base (20)..(20): 2'-O-methyl modified
  modified_base (21)..(21): 2'-O-methyl modified
  modified_base (22)..(22): 2'-O-methyl modified
uuugaaaucaaagucauccugg

SEQ ID NO: 1130 - RNA, 22 nt, Artificial Sequence
  synthetic construct
  misc_feature (1)..(4): linked via phosphorothioate
  modified_base (1)..(1): 5'-methoxyphosphonate-4-oxy modified
  modified_base (2)..(2): 2'-fluoro modified
  modified_base (3)..(3): 2'-fluoro modified
  modified_base (4)..(4): 2'-fluoro modified
  modified_base (5)..(5): 2'-fluoro modified
  modified_base (6)..(6): 2'-O-methyl modified
  modified_base (7)..(7): 2'-fluoro modified
  modified_base (8)..(8): 2'-O-methyl modified
  modified_base (9)..(9): 2'-O-methyl modified
  modified_base (10)..(10): 2'-fluoro modified
  modified_base (11)..(11): 2'-O-methyl modified
  modified_base (12)..(12): 2'-O-methyl modified
  modified_base (13)..(13): 2'-O-methyl modified
  modified_base (14)..(14): 2'-fluoro modified
  modified_base (15)..(15): 2'-O-methyl modified
  modified_base (16)..(16): 2'-O-methyl modified
  modified_base (17)..(17): 2'-O-methyl modified
  modified_base (18)..(18): 2'-O-methyl modified
  modified_base (19)..(19): 2'-O-methyl modified
  misc_feature (20)..(22): linked via phosphorothioate
  modified_base (20)..(20): 2'-O-methyl modified
  modified_base (21)..(21): 2'-O-methyl modified
  modified_base (22)..(22): 2'-O-methyl modified
uuaguugaaaucaaagucaugg

SEQ ID NO: 1131 - RNA, 22 nt, Artificial Sequence
  synthetic construct
  misc_feature (1)..(4): linked via phosphorothioate
  modified_base (1)..(1): 5'-methoxyphosphonate-4-oxy modified
  modified_base (2)..(2): 2'-fluoro modified
  modified_base (3)..(3): 2'-fluoro modified
  modified_base (4)..(4): 2'-fluoro modified
  modified_base (5)..(5): 2'-fluoro modified
  modified_base (6)..(6): 2'-O-methyl modified
  modified_base (7)..(7): 2'-fluoro modified
  modified_base (8)..(8): 2'-O-methyl modified
  modified_base (9)..(9): 2'-O-methyl modified
  modified_base (10)..(10): 2'-fluoro modified
  modified_base (11)..(11): 2'-O-methyl modified
  modified_base (12)..(12): 2'-O-methyl modified
  modified_base (13)..(13): 2'-O-methyl modified
  modified_base (14)..(14): 2'-fluoro modified
  modified_base (15)..(15): 2'-O-methyl modified
  modified_base (16)..(16): 2'-O-methyl modified
  modified_base (17)..(17): 2'-O-methyl modified
  modified_base (18)..(18): 2'-O-methyl modified
  modified_base (19)..(19): 2'-O-methyl modified
  misc_feature (20)..(22): linked via phosphorothioate
  modified_base (20)..(20): 2'-O-methyl modified
  modified_base (21)..(21): 2'-O-methyl modified
  modified_base (22)..(22): 2'-O-methyl modified
uagauuaugaaacaccaaaggg

SEQ ID NO: 1132 - RNA, 22 nt, Artificial Sequence
  synthetic construct
  misc_feature (1)..(4): linked via phosphorothioate
  modified_base (1)..(1): 5'-methoxyphosphonate-4-oxy modified
  modified_base (2)..(2): 2'-fluoro modified
  modified_base (3)..(3): 2'-fluoro modified
  modified_base (4)..(4): 2'-fluoro modified
  modified_base (5)..(5): 2'-fluoro modified
  modified_base (6)..(6): 2'-O-methyl modified
  modified_base (7)..(7): 2'-fluoro modified
  modified_base (8)..(8): 2'-O-methyl modified
  modified_base (9)..(9): 2'-O-methyl modified
  modified_base (10)..(10): 2'-fluoro modified
  modified_base (11)..(11): 2'-O-methyl modified
  modified_base (12)..(12): 2'-O-methyl modified
  modified_base (13)..(13): 2'-O-methyl modified
  modified_base (14)..(14): 2'-fluoro modified
  modified_base (15)..(15): 2'-O-methyl modified
  modified_base (16)..(16): 2'-O-methyl modified
  modified_base (17)..(17): 2'-O-methyl modified
  modified_base (18)..(18): 2'-O-methyl modified
  modified_base (19)..(19): 2'-O-methyl modified
  misc_feature (20)..(22): linked via phosphorothioate
  modified_base (20)..(20): 2'-O-methyl modified
  modified_base (21)..(21): 2'-O-methyl modified
  modified_base (22)..(22): 2'-O-methyl modified
uauaguugaaaucaaagucagg

SEQ ID NO: 1133 - RNA, 22 nt, Artificial Sequence
  synthetic construct
  misc_feature (1)..(4): linked via phosphorothioate
  modified_base (1)..(1): 5'-methoxyphosphonate-4-oxy modified
  modified_base (2)..(2): 2'-fluoro modified
  modified_base (3)..(3): 2'-fluoro modified
  modified_base (4)..(4): 2'-fluoro modified
  modified_base (5)..(5): 2'-fluoro modified
  modified_base (6)..(6): 2'-O-methyl modified
  modified_base (7)..(7): 2'-fluoro modified
  modified_base (8)..(8): 2'-O-methyl modified
  modified_base (9)..(9): 2'-O-methyl modified
  modified_base (10)..(10): 2'-fluoro modified
  modified_base (11)..(11): 2'-O-methyl modified
  modified_base (12)..(12): 2'-O-methyl modified
  modified_base (13)..(13): 2'-O-methyl modified
  modified_base (14)..(14): 2'-fluoro modified
  modified_base (15)..(15): 2'-O-methyl modified
  modified_base (16)..(16): 2'-O-methyl modified
  modified_base (17)..(17): 2'-O-methyl modified
  modified_base (18)..(18): 2'-O-methyl modified
  modified_base (19)..(19): 2'-O-methyl modified
  misc_feature (20)..(22): linked via phosphorothioate
  modified_base (20)..(20): 2'-O-methyl modified
  modified_base (21)..(21): 2'-O-methyl modified
  modified_base (22)..(22): 2'-O-methyl modified
uuauaguugaaaucaaagucgg

SEQ ID NO: 1134 - RNA, 22 nt, Artificial Sequence
  synthetic construct
  misc_feature (1)..(4): linked via phosphorothioate
  modified_base (1)..(1): 5'-methoxyphosphonate-4-oxy modified
  modified_base (2)..(2): 2'-fluoro modified
  modified_base (3)..(3): 2'-fluoro modified
  modified_base (4)..(4): 2'-fluoro modified
  modified_base (5)..(5): 2'-fluoro modified
  modified_base (6)..(6): 2'-O-methyl modified
  modified_base (7)..(7): 2'-fluoro modified
  modified_base (8)..(8): 2'-O-methyl modified
  modified_base (9)..(9): 2'-O-methyl modified
  modified_base (10)..(10): 2'-fluoro modified
  modified_base (11)..(11): 2'-O-methyl modified
  modified_base (12)..(12): 2'-O-methyl modified
  modified_base (13)..(13): 2'-O-methyl modified
  modified_base (14)..(14): 2'-fluoro modified
  modified_base (15)..(15): 2'-O-methyl modified
  modified_base (16)..(16): 2'-O-methyl modified
  modified_base (17)..(17): 2'-O-methyl modified
  modified_base (18)..(18): 2'-O-methyl modified
  modified_base (19)..(19): 2'-O-methyl modified
  misc_feature (20)..(22): linked via phosphorothioate
  modified_base (20)..(20): 2'-O-methyl modified
  modified_base (21)..(21): 2'-O-methyl modified
  modified_base (22)..(22): 2'-O-methyl modified
uuuguuuccauucagaucuugg

SEQ ID NO: 1135 - RNA, 22 nt, Artificial Sequence
  synthetic construct
  misc_feature (1)..(4): linked via phosphorothioate
  modified_base (1)..(1): 5'-methoxyphosphonate-4-oxy modified
  modified_base (2)..(2): 2'-fluoro modified
  modified_base (3)..(3): 2'-fluoro modified
  modified_base (4)..(4): 2'-fluoro modified
  modified_base (5)..(5): 2'-fluoro modified
  modified_base (6)..(6): 2'-O-methyl modified
  modified_base (7)..(7): 2'-fluoro modified
  modified_base (8)..(8): 2'-O-methyl modified
  modified_base (9)..(9): 2'-O-methyl modified
  modified_base (10)..(10): 2'-fluoro modified
  modified_base (11)..(11): 2'-O-methyl modified
  modified_base (12)..(12): 2'-O-methyl modified
  modified_base (13)..(13): 2'-O-methyl modified
  modified_base (14)..(14): 2'-fluoro modified
  modified_base (15)..(15): 2'-O-methyl modified
  modified_base (16)..(16): 2'-O-methyl modified
  modified_base (17)..(17): 2'-O-methyl modified
  modified_base (18)..(18): 2'-O-methyl modified
  modified_base (19)..(19): 2'-O-methyl modified
  misc_feature (20)..(22): linked via phosphorothioate
  modified_base (20)..(20): 2'-O-methyl modified
  modified_base (21)..(21): 2'-O-methyl modified
  modified_base (22)..(22): 2'-O-methyl modified
uaugacguuauccaguuuucgg

SEQ ID NO: 1136 - RNA, 22 nt, Artificial Sequence
  synthetic construct
  misc_feature (1)..(4): linked via phosphorothioate
  modified_base (1)..(1): 5'-methoxyphosphonate-4-oxy modified
  modified_base (2)..(2): 2'-fluoro modified
  modified_base (3)..(3): 2'-fluoro modified
  modified_base (4)..(4): 2'-fluoro modified
  modified_base (5)..(5): 2'-fluoro modified
  modified_base (6)..(6): 2'-O-methyl modified
  modified_base (7)..(7): 2'-fluoro modified
  modified_base (8)..(8): 2'-O-methyl modified
  modified_base (9)..(9): 2'-O-methyl modified
  modified_base (10)..(10): 2'-fluoro modified
  modified_base (11)..(11): 2'-O-methyl modified
  modified_base (12)..(12): 2'-O-methyl modified
  modified_base (13)..(13): 2'-O-methyl modified
  modified_base (14)..(14): 2'-fluoro modified
  modified_base (15)..(15): 2'-O-methyl modified
  modified_base (16)..(16): 2'-O-methyl modified
  modified_base (17)..(17): 2'-O-methyl modified
  modified_base (18)..(18): 2'-O-methyl modified
  modified_base (19)..(19): 2'-O-methyl modified
  misc_feature (20)..(22): linked via phosphorothioate
  modified_base (20)..(20): 2'-O-methyl modified
  modified_base (21)..(21): 2'-O-methyl modified
  modified_base (22)..(22): 2'-O-methyl modified
uugcuaaugacguuauccaggg

SEQ ID NO: 1137 - RNA, 22 nt, Artificial Sequence
  synthetic construct
  misc_feature (1)..(4): linked via phosphorothioate
  modified_base (1)..(1): 5'-methoxyphosphonate-4-oxy modified
  modified_base (2)..(2): 2'-fluoro modified
  modified_base (3)..(3): 2'-fluoro modified
  modified_base (4)..(4): 2'-fluoro modified
  modified_base (5)..(5): 2'-fluoro modified
  modified_base (6)..(6): 2'-O-methyl modified
  modified_base (7)..(7): 2'-fluoro modified
  modified_base (8)..(8): 2'-O-methyl modified
  modified_base (9)..(9): 2'-O-methyl modified
  modified_base (10)..(10): 2'-fluoro modified
  modified_base (11)..(11): 2'-O-methyl modified
  modified_base (12)..(12): 2'-O-methyl modified
  modified_base (13)..(13): 2'-O-methyl modified
  modified_base (14)..(14): 2'-fluoro modified
  modified_base (15)..(15): 2'-O-methyl modified
  modified_base (16)..(16): 2'-O-methyl modified
  modified_base (17)..(17): 2'-O-methyl modified
  modified_base (18)..(18): 2'-O-methyl modified
  modified_base (19)..(19): 2'-O-methyl modified
  misc_feature (20)..(22): linked via phosphorothioate
  modified_base (20)..(20): 2'-O-methyl modified
  modified_base (21)..(21): 2'-O-methyl modified
  modified_base (22)..(22): 2'-O-methyl modified
uucauuaaguuucuaaacaggg

SEQ ID NO: 1138 - RNA, 22 nt, Artificial Sequence
  synthetic construct
  misc_feature (1)..(4): linked via phosphorothioate
  modified_base (1)..(1): 5'-methoxyphosphonate-4-oxy modified
  modified_base (2)..(2): 2'-fluoro modified
  modified_base (3)..(3): 2'-fluoro modified
  modified_base (4)..(4): 2'-fluoro modified
  modified_base (5)..(5): 2'-fluoro modified
  modified_base (6)..(6): 2'-O-methyl modified
  modified_base (7)..(7): 2'-fluoro modified
  modified_base (8)..(8): 2'-O-methyl modified
  modified_base (9)..(9): 2'-O-methyl modified
  modified_base (10)..(10): 2'-fluoro modified
  modified_base (11)..(11): 2'-O-methyl modified
  modified_base (12)..(12): 2'-O-methyl modified
  modified_base (13)..(13): 2'-O-methyl modified
  modified_base (14)..(14): 2'-fluoro modified
  modified_base (15)..(15): 2'-O-methyl modified
  modified_base (16)..(16): 2'-O-methyl modified
  modified_base (17)..(17): 2'-O-methyl modified
  modified_base (18)..(18): 2'-O-methyl modified
  modified_base (19)..(19): 2'-O-methyl modified
  misc_feature (20)..(22): linked via phosphorothioate
  modified_base (20)..(20): 2'-O-methyl modified
  modified_base (21)..(21): 2'-O-methyl modified
  modified_base (22)..(22): 2'-O-methyl modified
ucacuuuucauuaaguuucugg

SEQ ID NO: 1139 - RNA, 22 nt, Artificial Sequence
  synthetic construct
  misc_feature (1)..(4): linked via phosphorothioate
  modified_base (1)..(1): 5'-methoxyphosphonate-4-oxy modified
  modified_base (2)..(2): 2'-fluoro modified
  modified_base (3)..(3): 2'-fluoro modified
  modified_base (4)..(4): 2'-fluoro modified
  modified_base (5)..(5): 2'-fluoro modified
  modified_base (6)..(6): 2'-O-methyl modified
  modified_base (7)..(7): 2'-fluoro modified
  modified_base (8)..(8): 2'-O-methyl modified
  modified_base (9)..(9): 2'-O-methyl modified
  modified_base (10)..(10): 2'-fluoro modified
  modified_base (11)..(11): 2'-O-methyl modified
  modified_base (12)..(12): 2'-O-methyl modified
  modified_base (13)..(13): 2'-O-methyl modified
  modified_base (14)..(14): 2'-fluoro modified
  modified_base (15)..(15): 2'-O-methyl modified
  modified_base (16)..(16): 2'-O-methyl modified
  modified_base (17)..(17): 2'-O-methyl modified
  modified_base (18)..(18): 2'-O-methyl modified
  modified_base (19)..(19): 2'-O-methyl modified
  misc_feature (20)..(22): linked via phosphorothioate
  modified_base (20)..(20): 2'-O-methyl modified
  modified_base (21)..(21): 2'-O-methyl modified
  modified_base (22)..(22): 2'-O-methyl modified
uucaacucagggaauuugacgg

SEQ ID NO: 1140 - RNA, 22 nt, Artificial Sequence
  synthetic construct
  misc_feature (1)..(4): linked via phosphorothioate
  modified_base (1)..(1): 5'-methoxyphosphonate-4-oxy modified
  modified_base (2)..(2): 2'-fluoro modified
  modified_base (3)..(3): 2'-fluoro modified
  modified_base (4)..(4): 2'-fluoro modified
  modified_base (5)..(5): 2'-fluoro modified
  modified_base (6)..(6): 2'-O-methyl modified
  modified_base (7)..(7): 2'-fluoro modified
  modified_base (8)..(8): 2'-O-methyl modified
  modified_base (9)..(9): 2'-O-methyl modified
  modified_base (10)..(10): 2'-fluoro modified
  modified_base (11)..(11): 2'-O-methyl modified
  modified_base (12)..(12): 2'-O-methyl modified
  modified_base (13)..(13): 2'-O-methyl modified
  modified_base (14)..(14): 2'-fluoro modified
  modified_base (15)..(15): 2'-O-methyl modified
  modified_base (16)..(16): 2'-O-methyl modified
  modified_base (17)..(17): 2'-O-methyl modified
  modified_base (18)..(18): 2'-O-methyl modified
  modified_base (19)..(19): 2'-O-methyl modified
  misc_feature (20)..(22): linked via phosphorothioate
  modified_base (20)..(20): 2'-O-methyl modified
  modified_base (21)..(21): 2'-O-methyl modified
  modified_base (22)..(22): 2'-O-methyl modified
uauaauucaacucagggaaugg

SEQ ID NO: 1141 - RNA, 22 nt, Artificial Sequence
  synthetic construct
  misc_feature (1)..(4): linked via phosphorothioate
  modified_base (1)..(1): 5'-methoxyphosphonate-4-oxy modified
  modified_base (2)..(2): 2'-fluoro modified
  modified_base (3)..(3): 2'-fluoro modified
  modified_base (4)..(4): 2'-fluoro modified
  modified_base (5)..(5): 2'-fluoro modified
  modified_base (6)..(6): 2'-O-methyl modified
  modified_base (7)..(7): 2'-fluoro modified
  modified_base (8)..(8): 2'-O-methyl modified
  modified_base (9)..(9): 2'-O-methyl modified
  modified_base (10)..(10): 2'-fluoro modified
  modified_base (11)..(11): 2'-O-methyl modified
  modified_base (12)..(12): 2'-O-methyl modified
  modified_base (13)..(13): 2'-O-methyl modified
  modified_base (14)..(14): 2'-fluoro modified
  modified_base (15)..(15): 2'-O-methyl modified
  modified_base (16)..(16): 2'-O-methyl modified
  modified_base (17)..(17): 2'-O-methyl modified
  modified_base (18)..(18): 2'-O-methyl modified
  modified_base (19)..(19): 2'-O-methyl modified
  misc_feature (20)..(22): linked via phosphorothioate
  modified_base (20)..(20): 2'-O-methyl modified
  modified_base (21)..(21): 2'-O-methyl modified
  modified_base (22)..(22): 2'-O-methyl modified
uaagcugauaauucaacucagg

SEQ ID NO: 1142 - RNA, 22 nt, Artificial Sequence
  synthetic construct
  misc_feature (1)..(4): linked via phosphorothioate
  modified_base (1)..(1): 5'-methoxyphosphonate-4-oxy modified
  modified_base (2)..(2): 2'-fluoro modified
  modified_base (3)..(3): 2'-fluoro modified
  modified_base (4)..(4): 2'-fluoro modified
  modified_base (5)..(5): 2'-fluoro modified
  modified_base (6)..(6): 2'-O-methyl modified
  modified_base (7)..(7): 2'-fluoro modified
  modified_base (8)..(8): 2'-O-methyl modified
  modified_base (9)..(9): 2'-O-methyl modified
  modified_base (10)..(10): 2'-fluoro modified
  modified_base (11)..(11): 2'-O-methyl modified
  modified_base (12)..(12): 2'-O-methyl modified
  modified_base (13)..(13): 2'-O-methyl modified
  modified_base (14)..(14): 2'-fluoro modified
  modified_base (15)..(15): 2'-O-methyl modified
  modified_base (16)..(16): 2'-O-methyl modified
  modified_base (17)..(17): 2'-O-methyl modified
  modified_base (18)..(18): 2'-O-methyl modified
  modified_base (19)..(19): 2'-O-methyl modified
  misc_feature (20)..(22): linked via phosphorothioate
  modified_base (20)..(20): 2'-O-methyl modified
  modified_base (21)..(21): 2'-O-methyl modified
  modified_base (22)..(22): 2'-O-methyl modified
uuaagcugauaauucaacucgg

SEQ ID NO: 1143 - RNA, 22 nt, Artificial Sequence
  synthetic construct
  misc_feature (1)..(4): linked via phosphorothioate
  modified_base (1)..(1): 5'-methoxyphosphonate-4-oxy modified
  modified_base (2)..(2): 2'-fluoro modified
  modified_base (3)..(3): 2'-fluoro modified
  modified_base (4)..(4): 2'-fluoro modified
  modified_base (5)..(5): 2'-fluoro modified
  modified_base (6)..(6): 2'-O-methyl modified
  modified_base (7)..(7): 2'-fluoro modified
  modified_base (8)..(8): 2'-O-methyl modified
  modified_base (9)..(9): 2'-O-methyl modified
  modified_base (10)..(10): 2'-fluoro modified
  modified_base (11)..(11): 2'-O-methyl modified
  modified_base (12)..(12): 2'-O-methyl modified
  modified_base (13)..(13): 2'-O-methyl modified
  modified_base (14)..(14): 2'-fluoro modified
  modified_base (15)..(15): 2'-O-methyl modified
  modified_base (16)..(16): 2'-O-methyl modified
  modified_base (17)..(17): 2'-O-methyl modified
  modified_base (18)..(18): 2'-O-methyl modified
  modified_base (19)..(19): 2'-O-methyl modified
  misc_feature (20)..(22): linked via phosphorothioate
  modified_base (20)..(20): 2'-O-methyl modified
  modified_base (21)..(21): 2'-O-methyl modified
  modified_base (22)..(22): 2'-O-methyl modified
uuuaagcugauaauucaacugg

SEQ ID NO: 1144 - RNA, 22 nt, Artificial Sequence
  synthetic construct
  misc_feature (1)..(4): linked via phosphorothioate
  modified_base (1)..(1): 5'-methoxyphosphonate-4-oxy modified
  modified_base (2)..(2): 2'-fluoro modified
  modified_base (3)..(3): 2'-fluoro modified
  modified_base (4)..(4): 2'-fluoro modified
  modified_base (5)..(5): 2'-fluoro modified
  modified_base (6)..(6): 2'-O-methyl modified
  modified_base (7)..(7): 2'-fluoro modified
  modified_base (8)..(8): 2'-O-methyl modified
  modified_base (9)..(9): 2'-O-methyl modified
  modified_base (10)..(10): 2'-fluoro modified
  modified_base (11)..(11): 2'-O-methyl modified
  modified_base (12)..(12): 2'-O-methyl modified
  modified_base (13)..(13): 2'-O-methyl modified
  modified_base (14)..(14): 2'-fluoro modified
  modified_base (15)..(15): 2'-O-methyl modified
  modified_base (16)..(16): 2'-O-methyl modified
  modified_base (17)..(17): 2'-O-methyl modified
  modified_base (18)..(18): 2'-O-methyl modified
  modified_base (19)..(19): 2'-O-methyl modified
  misc_feature (20)..(22): linked via phosphorothioate
  modified_base (20)..(20): 2'-O-methyl modified
  modified_base (21)..(21): 2'-O-methyl modified
  modified_base (22)..(22): 2'-O-methyl modified
uauuuuaagcugauaauucagg

SEQ ID NO: 1145 - RNA, 22 nt, Artificial Sequence
  synthetic construct
  misc_feature (1)..(4): linked via phosphorothioate
  modified_base (1)..(1): 5'-methoxyphosphonate-4-oxy modified
  modified_base (2)..(2): 2'-fluoro modified
  modified_base (3)..(3): 2'-fluoro modified
  modified_base (4)..(4): 2'-fluoro modified
  modified_base (5)..(5): 2'-fluoro modified
  modified_base (6)..(6): 2'-O-methyl modified
  modified_base (7)..(7): 2'-fluoro modified
  modified_base (8)..(8): 2'-O-methyl modified
  modified_base (9)..(9): 2'-O-methyl modified
  modified_base (10)..(10): 2'-fluoro modified
  modified_base (11)..(11): 2'-O-methyl modified
  modified_base (12)..(12): 2'-O-methyl modified
  modified_base (13)..(13): 2'-O-methyl modified
  modified_base (14)..(14): 2'-fluoro modified
  modified_base (15)..(15): 2'-O-methyl modified
  modified_base (16)..(16): 2'-O-methyl modified
  modified_base (17)..(17): 2'-O-methyl modified
  modified_base (18)..(18): 2'-O-methyl modified
  modified_base (19)..(19): 2'-O-methyl modified
  misc_feature (20)..(22): linked via phosphorothioate
  modified_base (20)..(20): 2'-O-methyl modified
  modified_base (21)..(21): 2'-O-methyl modified
  modified_base (22)..(22): 2'-O-methyl modified
uuaauuuuaagcugauaauugg

SEQ ID NO: 1146 - RNA, 22 nt, Artificial Sequence
  synthetic construct
  misc_feature (1)..(4): linked via phosphorothioate
  modified_base (1)..(1): 5'-methoxyphosphonate-4-oxy modified
  modified_base (2)..(2): 2'-fluoro modified
  modified_base (3)..(3): 2'-fluoro modified
  modified_base (4)..(4): 2'-fluoro modified
  modified_base (5)..(5): 2'-fluoro modified
  modified_base (6)..(6): 2'-O-methyl modified
  modified_base (7)..(7): 2'-fluoro modified
  modified_base (8)..(8): 2'-O-methyl modified
  modified_base (9)..(9): 2'-O-methyl modified
  modified_base (10)..(10): 2'-fluoro modified
  modified_base (11)..(11): 2'-O-methyl modified
  modified_base (12)..(12): 2'-O-methyl modified
  modified_base (13)..(13): 2'-O-methyl modified
  modified_base (14)..(14): 2'-fluoro modified
  modified_base (15)..(15): 2'-O-methyl modified
  modified_base (16)..(16): 2'-O-methyl modified
  modified_base (17)..(17): 2'-O-methyl modified
  modified_base (18)..(18): 2'-O-methyl modified
  modified_base (19)..(19): 2'-O-methyl modified
  misc_feature (20)..(22): linked via phosphorothioate
  modified_base (20)..(20): 2'-O-methyl modified
  modified_base (21)..(21): 2'-O-methyl modified
  modified_base (22)..(22): 2'-O-methyl modified
uuuaauuuuaagcugauaaugg

SEQ ID NO: 1147 - RNA, 22 nt, Artificial Sequence
  synthetic construct
  misc_feature (1)..(4): linked via phosphorothioate
  modified_base (1)..(1): 5'-methoxyphosphonate-4-oxy modified
  modified_base (2)..(2): 2'-fluoro modified
  modified_base (3)..(3): 2'-fluoro modified
  modified_base (4)..(4): 2'-fluoro modified
  modified_base (5)..(5): 2'-fluoro modified
  modified_base (6)..(6): 2'-O-methyl modified
  modified_base (7)..(7): 2'-fluoro modified
  modified_base (8)..(8): 2'-O-methyl modified
  modified_base (9)..(9): 2'-O-methyl modified
  modified_base (10)..(10): 2'-fluoro modified
  modified_base (11)..(11): 2'-O-methyl modified
  modified_base (12)..(12): 2'-O-methyl modified
  modified_base (13)..(13): 2'-O-methyl modified
  modified_base (14)..(14): 2'-fluoro modified
  modified_base (15)..(15): 2'-O-methyl modified
  modified_base (16)..(16): 2'-O-methyl modified
  modified_base (17)..(17): 2'-O-methyl modified
  modified_base (18)..(18): 2'-O-methyl modified
  modified_base (19)..(19): 2'-O-methyl modified
  misc_feature (20)..(22): linked via phosphorothioate
  modified_base (20)..(20): 2'-O-methyl modified
  modified_base (21)..(21): 2'-O-methyl modified
  modified_base (22)..(22): 2'-O-methyl modified
uacacuuuaauuuuaagcuggg

SEQ ID NO: 1148 - RNA, 22 nt, Artificial Sequence
  synthetic construct
  misc_feature (1)..(4): linked via phosphorothioate
  modified_base (1)..(1): 5'-methoxyphosphonate-4-oxy modified
  modified_base (2)..(2): 2'-fluoro modified
  modified_base (3)..(3): 2'-fluoro modified
  modified_base (4)..(4): 2'-fluoro modified
  modified_base (5)..(5): 2'-fluoro modified
  modified_base (6)..(6): 2'-O-methyl modified
  modified_base (7)..(7): 2'-fluoro modified
  modified_base (8)..(8): 2'-O-methyl modified
  modified_base (9)..(9): 2'-O-methyl modified
  modified_base (10)..(10): 2'-fluoro modified
  modified_base (11)..(11): 2'-O-methyl modified
  modified_base (12)..(12): 2'-O-methyl modified
  modified_base (13)..(13): 2'-O-methyl modified
  modified_base (14)..(14): 2'-fluoro modified
  modified_base (15)..(15): 2'-O-methyl modified
  modified_base (16)..(16): 2'-O-methyl modified
  modified_base (17)..(17): 2'-O-methyl modified
  modified_base (18)..(18): 2'-O-methyl modified
  modified_base (19)..(19): 2'-O-methyl modified
  misc_feature (20)..(22): linked via phosphorothioate
  modified_base (20)..(20): 2'-O-methyl modified
  modified_base (21)..(21): 2'-O-methyl modified
  modified_base (22)..(22): 2'-O-methyl modified
ucacacuuuaauuuuaagcugg

SEQ ID NO: 1149 - RNA, 22 nt, Artificial Sequence
  synthetic construct
  misc_feature (1)..(4): linked via phosphorothioate
  modified_base (1)..(1): 5'-methoxyphosphonate-4-oxy modified
  modified_base (2)..(2): 2'-fluoro modified
  modified_base (3)..(3): 2'-fluoro modified
  modified_base (4)..(4): 2'-fluoro modified
  modified_base (5)..(5): 2'-fluoro modified
  modified_base (6)..(6): 2'-O-methyl modified
  modified_base (7)..(7): 2'-fluoro modified
  modified_base (8)..(8): 2'-O-methyl modified
  modified_base (9)..(9): 2'-O-methyl modified
  modified_base (10)..(10): 2'-fluoro modified
  modified_base (11)..(11): 2'-O-methyl modified
  modified_base (12)..(12): 2'-O-methyl modified
  modified_base (13)..(13): 2'-O-methyl modified
  modified_base (14)..(14): 2'-fluoro modified
  modified_base (15)..(15): 2'-O-methyl modified
  modified_base (16)..(16): 2'-O-methyl modified
  modified_base (17)..(17): 2'-O-methyl modified
  modified_base (18)..(18): 2'-O-methyl modified
  modified_base (19)..(19): 2'-O-methyl modified
  misc_feature (20)..(22): linked via phosphorothioate
  modified_base (20)..(20): 2'-O-methyl modified
  modified_base (21)..(21): 2'-O-methyl modified
  modified_base (22)..(22): 2'-O-methyl modified
uacacccugaauaauucacagg

SEQ ID NO: 1150 - RNA, 22 nt, Artificial Sequence
  synthetic construct
  misc_feature (1)..(4): linked via phosphorothioate
  modified_base (1)..(1): 5'-methoxyphosphonate-4-oxy modified
  modified_base (2)..(2): 2'-fluoro modified
  modified_base (3)..(3): 2'-fluoro modified
  modified_base (4)..(4): 2'-fluoro modified
  modified_base (5)..(5): 2'-fluoro modified
  modified_base (6)..(6): 2'-O-methyl modified
  modified_base (7)..(7): 2'-fluoro modified
  modified_base (8)..(8): 2'-O-methyl modified
  modified_base (9)..(9): 2'-O-methyl modified
  modified_base (10)..(10): 2'-fluoro modified
  modified_base (11)..(11): 2'-O-methyl modified
  modified_base (12)..(12): 2'-O-methyl modified
  modified_base (13)..(13): 2'-O-methyl modified
  modified_base (14)..(14): 2'-fluoro modified
  modified_base (15)..(15): 2'-O-methyl modified
  modified_base (16)..(16): 2'-O-methyl modified
  modified_base (17)..(17): 2'-O-methyl modified
  modified_base (18)..(18): 2'-O-methyl modified
  modified_base (19)..(19): 2'-O-methyl modified
  misc_feature (20)..(22): linked via phosphorothioate
  modified_base (20)..(20): 2'-O-methyl modified
  modified_base (21)..(21): 2'-O-methyl modified
  modified_base (22)..(22): 2'-O-methyl modified
uacaaggucaaugauauugugg

SEQ ID NO: 1151 - RNA, 22 nt, Artificial Sequence
  synthetic construct
  misc_feature (1)..(4): linked via phosphorothioate
  modified_base (1)..(1): 5'-methoxyphosphonate-4-oxy modified
  modified_base (2)..(2): 2'-fluoro modified
  modified_base (3)..(3): 2'-fluoro modified
  modified_base (4)..(4): 2'-fluoro modified
  modified_base (5)..(5): 2'-fluoro modified
  modified_base (6)..(6): 2'-O-methyl modified
  modified_base (7)..(7): 2'-fluoro modified
  modified_base (8)..(8): 2'-O-methyl modified
  modified_base (9)..(9): 2'-O-methyl modified
  modified_base (10)..(10): 2'-fluoro modified
  modified_base (11)..(11): 2'-O-methyl modified
  modified_base (12)..(12): 2'-O-methyl modified
  modified_base (13)..(13): 2'-O-methyl modified
  modified_base (14)..(14): 2'-fluoro modified
  modified_base (15)..(15): 2'-O-methyl modified
  modified_base (16)..(16): 2'-O-methyl modified
  modified_base (17)..(17): 2'-O-methyl modified
  modified_base (18)..(18): 2'-O-methyl modified
  modified_base (19)..(19): 2'-O-methyl modified
  misc_feature (20)..(22): linked via phosphorothioate
  modified_base (20)..(20): 2'-O-methyl modified
  modified_base (21)..(21): 2'-O-methyl modified
  modified_base (22)..(22): 2'-O-methyl modified
uucacaaggucaaugauauugg

SEQ ID NO: 1152 - RNA, 22 nt, Artificial Sequence
  synthetic construct
  misc_feature (1)..(4): linked via phosphorothioate
  modified_base (1)..(1): 5'-methoxyphosphonate-4-oxy modified
  modified_base (2)..(2): 2'-fluoro modified
  modified_base (3)..(3): 2'-fluoro modified
  modified_base (4)..(4): 2'-fluoro modified
  modified_base (5)..(5): 2'-fluoro modified
  modified_base (6)..(6): 2'-O-methyl modified
  modified_base (7)..(7): 2'-fluoro modified
  modified_base (8)..(8): 2'-O-methyl modified
  modified_base (9)..(9): 2'-O-methyl modified
  modified_base (10)..(10): 2'-fluoro modified
  modified_base (11)..(11): 2'-O-methyl modified
  modified_base (12)..(12): 2'-O-methyl modified
  modified_base (13)..(13): 2'-O-methyl modified
  modified_base (14)..(14): 2'-fluoro modified
  modified_base (15)..(15): 2'-O-methyl modified
  modified_base (16)..(16): 2'-O-methyl modified
  modified_base (17)..(17): 2'-O-methyl modified
  modified_base (18)..(18): 2'-O-methyl modified
  modified_base (19)..(19): 2'-O-methyl modified
  misc_feature (20)..(22): linked via phosphorothioate
  modified_base (20)..(20): 2'-O-methyl modified
  modified_base (21)..(21): 2'-O-methyl modified
  modified_base (22)..(22): 2'-O-methyl modified
uuuuucacaaggucaaugaugg

SEQ ID NO: 1153 - RNA, 22 nt, Artificial Sequence
  synthetic construct
  misc_feature (1)..(4): linked via phosphorothioate
  modified_base (1)..(1): 5'-methoxyphosphonate-4-oxy modified
  modified_base (2)..(2): 2'-fluoro modified
  modified_base (3)..(3): 2'-fluoro modified
  modified_base (4)..(4): 2'-fluoro modified
  modified_base (5)..(5): 2'-fluoro modified
  modified_base (6)..(6): 2'-O-methyl modified
  modified_base (7)..(7): 2'-fluoro modified
  modified_base (8)..(8): 2'-O-methyl modified
  modified_base (9)..(9): 2'-O-methyl modified
  modified_base (10)..(10): 2'-fluoro modified
  modified_base (11)..(11): 2'-O-methyl modified
  modified_base (12)..(12): 2'-O-methyl modified
  modified_base (13)..(13): 2'-O-methyl modified
  modified_base (14)..(14): 2'-fluoro modified
  modified_base (15)..(15): 2'-O-methyl modified
  modified_base (16)..(16): 2'-O-methyl modified
  modified_base (17)..(17): 2'-O-methyl modified
  modified_base (18)..(18): 2'-O-methyl modified
  modified_base (19)..(19): 2'-O-methyl modified
  misc_feature (20)..(22): linked via phosphorothioate
  modified_base (20)..(20): 2'-O-methyl modified
  modified_base (21)..(21): 2'-O-methyl modified
  modified_base (22)..(22): 2'-O-methyl modified
uaugauuucagcaaaugacagg

SEQ ID NO: 1154 - RNA, 22 nt, Artificial Sequence
  synthetic construct
  misc_feature (1)..(4): linked via phosphorothioate
  modified_base (1)..(1): 5'-methoxyphosphonate-4-oxy modified
  modified_base (2)..(2): 2'-fluoro modified
  modified_base (3)..(3): 2'-fluoro modified
  modified_base (4)..(4): 2'-fluoro modified
  modified_base (5)..(5): 2'-fluoro modified
  modified_base (6)..(6): 2'-O-methyl modified
  modified_base (7)..(7): 2'-fluoro modified
  modified_base (8)..(8): 2'-O-methyl modified
  modified_base (9)..(9): 2'-O-methyl modified
  modified_base (10)..(10): 2'-fluoro modified
  modified_base (11)..(11): 2'-O-methyl modified
  modified_base (12)..(12): 2'-O-methyl modified
  modified_base (13)..(13): 2'-O-methyl modified
  modified_base (14)..(14): 2'-fluoro modified
  modified_base (15)..(15): 2'-O-methyl modified
  modified_base (16)..(16): 2'-O-methyl modified
  modified_base (17)..(17): 2'-O-methyl modified
  modified_base (18)..(18): 2'-O-methyl modified
  modified_base (19)..(19): 2'-O-methyl modified
  misc_feature (20)..(22): linked via phosphorothioate
  modified_base (20)..(20): 2'-O-methyl modified
  modified_base (21)..(21): 2'-O-methyl modified
  modified_base (22)..(22): 2'-O-methyl modified
uagauaaacuuggucuucaggg

SEQ ID NO: 1155 - RNA, 22 nt, Artificial Sequence
  synthetic construct
  misc_feature (1)..(4): linked via phosphorothioate
  modified_base (1)..(1): 5'-methoxyphosphonate-4-oxy modified
  modified_base (2)..(2): 2'-fluoro modified
  modified_base (3)..(3): 2'-fluoro modified
  modified_base (4)..(4): 2'-fluoro modified
  modified_base (5)..(5): 2'-fluoro modified
  modified_base (6)..(6): 2'-O-methyl modified
  modified_base (7)..(7): 2'-fluoro modified
  modified_base (8)..(8): 2'-O-methyl modified
  modified_base (9)..(9): 2'-O-methyl modified
  modified_base (10)..(10): 2'-fluoro modified
  modified_base (11)..(11): 2'-O-methyl modified
  modified_base (12)..(12): 2'-O-methyl modified
  modified_base (13)..(13): 2'-O-methyl modified
  modified_base (14)..(14): 2'-fluoro modified
  modified_base (15)..(15): 2'-O-methyl modified
  modified_base (16)..(16): 2'-O-methyl modified
  modified_base (17)..(17): 2'-O-methyl modified
  modified_base (18)..(18): 2'-O-methyl modified
  modified_base (19)..(19): 2'-O-methyl modified
  misc_feature (20)..(22): linked via phosphorothioate
  modified_base (20)..(20): 2'-O-methyl modified
  modified_base (21)..(21): 2'-O-methyl modified
  modified_base (22)..(22): 2'-O-methyl modified
uugucacacagauaaacuuggg

SEQ ID NO: 1156 - RNA, 22 nt, Artificial Sequence
  synthetic construct
  misc_feature (1)..(4): linked via phosphorothioate
  modified_base (1)..(1): 5'-methoxyphosphonate-4-oxy modified
  modified_base (2)..(2): 2'-fluoro modified
  modified_base (3)..(3): 2'-fluoro modified
  modified_base (4)..(4): 2'-fluoro modified
  modified_base (5)..(5): 2'-fluoro modified
  modified_base (6)..(6): 2'-O-methyl modified
  modified_base (7)..(7): 2'-fluoro modified
  modified_base (8)..(8): 2'-O-methyl modified
  modified_base (9)..(9): 2'-O-methyl modified
  modified_base (10)..(10): 2'-fluoro modified
  modified_base (11)..(11): 2'-O-methyl modified
  modified_base (12)..(12): 2'-O-methyl modified
  modified_base (13)..(13): 2'-O-methyl modified
  modified_base (14)..(14): 2'-fluoro modified
  modified_base (15)..(15): 2'-O-methyl modified
  modified_base (16)..(16): 2'-O-methyl modified
  modified_base (17)..(17): 2'-O-methyl modified
  modified_base (18)..(18): 2'-O-methyl modified
  modified_base (19)..(19): 2'-O-methyl modified
  misc_feature (20)..(22): linked via phosphorothioate
  modified_base (20)..(20): 2'-O-methyl modified
  modified_base (21)..(21): 2'-O-methyl modified
  modified_base (22)..(22): 2'-O-methyl modified
uucaccauuauuuccaaacugg

SEQ ID NO: 1157 - RNA, 22 nt, Artificial Sequence
  synthetic construct
  misc_feature (1)..(4): linked via phosphorothioate
  modified_base (1)..(1): 5'-methoxyphosphonate-4-oxy modified
  modified_base (2)..(2): 2'-fluoro modified
  modified_base (3)..(3): 2'-fluoro modified
  modified_base (4)..(4): 2'-fluoro modified
  modified_base (5)..(5): 2'-fluoro modified
  modified_base (6)..(6): 2'-O-methyl modified
  modified_base (7)..(7): 2'-fluoro modified
  modified_base (8)..(8): 2'-O-methyl modified
  modified_base (9)..(9): 2'-O-methyl modified
  modified_base (10)..(10): 2'-fluoro modified
  modified_base (11)..(11): 2'-O-methyl modified
  modified_base (12)..(12): 2'-O-methyl modified
  modified_base (13)..(13): 2'-O-methyl modified
  modified_base (14)..(14): 2'-fluoro modified
  modified_base (15)..(15): 2'-O-methyl modified
  modified_base (16)..(16): 2'-O-methyl modified
  modified_base (17)..(17): 2'-O-methyl modified
  modified_base (18)..(18): 2'-O-methyl modified
  modified_base (19)..(19): 2'-O-methyl modified
  misc_feature (20)..(22): linked via phosphorothioate
  modified_base (20)..(20): 2'-O-methyl modified
  modified_base (21)..(21): 2'-O-methyl modified
  modified_base (22)..(22): 2'-O-methyl modified
uuucacucauuucucuauuugg

SEQ ID NO: 1158 - RNA, 22 nt, Artificial Sequence
  synthetic construct
  misc_feature (1)..(4): linked via phosphorothioate
  modified_base (1)..(1): 5'-methoxyphosphonate-4-oxy modified
  modified_base (2)..(2): 2'-fluoro modified
  modified_base (3)..(3): 2'-fluoro modified
  modified_base (4)..(4): 2'-fluoro modified
  modified_base (5)..(5): 2'-fluoro modified
  modified_base (6)..(6): 2'-O-methyl modified
  modified_base (7)..(7): 2'-fluoro modified
  modified_base (8)..(8): 2'-O-methyl modified
  modified_base (9)..(9): 2'-O-methyl modified
  modified_base (10)..(10): 2'-fluoro modified
  modified_base (11)..(11): 2'-O-methyl modified
  modified_base (12)..(12): 2'-O-methyl modified
  modified_base (13)..(13): 2'-O-methyl modified
  modified_base (14)..(14): 2'-fluoro modified
  modified_base (15)..(15): 2'-O-methyl modified
  modified_base (16)..(16): 2'-O-methyl modified
  modified_base (17)..(17): 2'-O-methyl modified
  modified_base (18)..(18): 2'-O-methyl modified
  modified_base (19)..(19): 2'-O-methyl modified
  misc_feature (20)..(22): linked via phosphorothioate
  modified_base (20)..(20): 2'-O-methyl modified
  modified_base (21)..(21): 2'-O-methyl modified
  modified_base (22)..(22): 2'-O-methyl modified
uauucacucauuucucuauugg

SEQ ID NO: 1159 - RNA, 22 nt, Artificial Sequence
  synthetic construct
  misc_feature (1)..(3): linked via phosphorothioate
  modified_base (1)..(1): 5'-methoxyphosphonate-4-oxy modified
  modified_base (2)..(2): 2'-fluoro modified
  modified_base (3)..(3): 2'-fluoro modified
  modified_base (4)..(4): 2'-fluoro modified
  modified_base (5)..(5): 2'-fluoro modified
  modified_base (6)..(6): 2'-O-methyl modified
  modified_base (7)..(7): 2'-fluoro modified
  modified_base (8)..(8): 2'-O-methyl modified
  modified_base (9)..(9): 2'-O-methyl modified
  modified_base (10)..(10): 2'-fluoro modified
  modified_base (11)..(11): 2'-O-methyl modified
  modified_base (12)..(12): 2'-O-methyl modified
  modified_base (13)..(13): 2'-O-methyl modified
  modified_base (14)..(14): 2'-fluoro modified
  modified_base (15)..(15): 2'-O-methyl modified
  modified_base (16)..(16): 2'-O-methyl modified
  modified_base (17)..(17): 2'-O-methyl modified
  modified_base (18)..(18): 2'-O-methyl modified
  modified_base (19)..(19): 2'-O-methyl modified
  misc_feature (20)..(22): linked via phosphorothioate
  modified_base (20)..(20): 2'-O-methyl modified
  modified_base (21)..(21): 2'-O-methyl modified
  modified_base (22)..(22): 2'-O-methyl modified
uaaaaaaucuggaaccacaagg

SEQ ID NO: 1160 - RNA, 22 nt, Artificial Sequence
  synthetic construct
  misc_feature (1)..(3): linked via phosphorothioate
  modified_base (1)..(1): 5'-methoxyphosphonate-4-oxy modified
  modified_base (2)..(2): 2'-fluoro modified
  modified_base (3)..(3): 2'-fluoro modified
  modified_base (4)..(4): 2'-fluoro modified
  modified_base (5)..(5): 2'-fluoro modified
  modified_base (6)..(6): 2'-O-methyl modified
  modified_base (7)..(7): 2'-fluoro modified
  modified_base (8)..(8): 2'-O-methyl modified
  modified_base (9)..(9): 2'-O-methyl modified
  modified_base (10)..(10): 2'-fluoro modified
  modified_base (11)..(11): 2'-O-methyl modified
  modified_base (12)..(12): 2'-O-methyl modified
  modified_base (13)..(13): 2'-O-methyl modified
  modified_base (14)..(14): 2'-fluoro modified
  modified_base (15)..(15): 2'-O-methyl modified
  modified_base (16)..(16): 2'-O-methyl modified
  modified_base (17)..(17): 2'-O-methyl modified
  modified_base (18)..(18): 2'-O-methyl modified
  modified_base (19)..(19): 2'-O-methyl modified
  misc_feature (20)..(22): linked via phosphorothioate
  modified_base (20)..(20): 2'-O-methyl modified
  modified_base (21)..(21): 2'-O-methyl modified
  modified_base (22)..(22): 2'-O-methyl modified
uaaaaaucuggaaccacaaagg

SEQ ID NO: 1161 - RNA, 22 nt, Artificial Sequence
  synthetic construct
  misc_feature (1)..(3): linked via phosphorothioate
  modified_base (1)..(1): 5'-methoxyphosphonate-4-oxy modified
  modified_base (2)..(2): 2'-fluoro modified
  modified_base (3)..(3): 2'-fluoro modified
  modified_base (4)..(4): 2'-fluoro modified
  modified_base (5)..(5): 2'-fluoro modified
  modified_base (6)..(6): 2'-O-methyl modified
  modified_base (7)..(7): 2'-fluoro modified
  modified_base (8)..(8): 2'-O-methyl modified
  modified_base (9)..(9): 2'-O-methyl modified
  modified_base (10)..(10): 2'-fluoro modified
  modified_base (11)..(11): 2'-O-methyl modified
  modified_base (12)..(12): 2'-O-methyl modified
  modified_base (13)..(13): 2'-O-methyl modified
  modified_base (14)..(14): 2'-fluoro modified
  modified_base (15)..(15): 2'-O-methyl modified
  modified_base (16)..(16): 2'-O-methyl modified
  modified_base (17)..(17): 2'-O-methyl modified
  modified_base (18)..(18): 2'-O-methyl modified
  modified_base (19)..(19): 2'-O-methyl modified
  misc_feature (20)..(22): linked via phosphorothioate
  modified_base (20)..(20): 2'-O-methyl modified
  modified_base (21)..(21): 2'-O-methyl modified
  modified_base (22)..(22): 2'-O-methyl modified
uuccaaacugcaucaaugaagg

SEQ ID NO: 1162 - RNA, 22 nt, Artificial Sequence
  synthetic construct
  misc_feature (1)..(3): linked via phosphorothioate
  modified_base (1)..(1): 5'-methoxyphosphonate-4-oxy modified
  modified_base (2)..(2): 2'-fluoro modified
  modified_base (3)..(3): 2'-fluoro modified
  modified_base (4)..(4): 2'-fluoro modified
  modified_base (5)..(5): 2'-fluoro modified
  modified_base (6)..(6): 2'-O-methyl modified
  modified_base (7)..(7): 2'-fluoro modified
  modified_base (8)..(8): 2'-O-methyl modified
  modified_base (9)..(9): 2'-O-methyl modified
  modified_base (10)..(10): 2'-fluoro modified
  modified_base (11)..(11): 2'-O-methyl modified
  modified_base (12)..(12): 2'-O-methyl modified
  modified_base (13)..(13): 2'-O-methyl modified
  modified_base (14)..(14): 2'-fluoro modified
  modified_base (15)..(15): 2'-O-methyl modified
  modified_base (16)..(16): 2'-O-methyl modified
  modified_base (17)..(17): 2'-O-methyl modified
  modified_base (18)..(18): 2'-O-methyl modified
  modified_base (19)..(19): 2'-O-methyl modified
  misc_feature (20)..(22): linked via phosphorothioate
  modified_base (20)..(20): 2'-O-methyl modified
  modified_base (21)..(21): 2'-O-methyl modified
  modified_base (22)..(22): 2'-O-methyl modified
uuuauuuccaaacugcaucagg

SEQ ID NO: 1163 - RNA, 22 nt, Artificial Sequence
  synthetic construct
  misc_feature (1)..(3): linked via phosphorothioate
  modified_base (1)..(1): 5'-methoxyphosphonate-4-oxy modified
  modified_base (2)..(2): 2'-fluoro modified
  modified_base (3)..(3): 2'-fluoro modified
  modified_base (4)..(4): 2'-fluoro modified
  modified_base (5)..(5): 2'-fluoro modified
  modified_base (6)..(6): 2'-O-methyl modified
  modified_base (7)..(7): 2'-fluoro modified
  modified_base (8)..(8): 2'-O-methyl modified
  modified_base (9)..(9): 2'-O-methyl modified
  modified_base (10)..(10): 2'-fluoro modified
  modified_base (11)..(11): 2'-O-methyl modified
  modified_base (12)..(12): 2'-O-methyl modified
  modified_base (13)..(13): 2'-O-methyl modified
  modified_base (14)..(14): 2'-fluoro modified
  modified_base (15)..(15): 2'-O-methyl modified
  modified_base (16)..(16): 2'-O-methyl modified
  modified_base (17)..(17): 2'-O-methyl modified
  modified_base (18)..(18): 2'-O-methyl modified
  modified_base (19)..(19): 2'-O-methyl modified
  misc_feature (20)..(22): linked via phosphorothioate
  modified_base (20)..(20): 2'-O-methyl modified
  modified_base (21)..(21): 2'-O-methyl modified
  modified_base (22)..(22): 2'-O-methyl modified
uauuucagcaaaugacaugugg

SEQ ID NO: 1164 - RNA, 22 nt, Artificial Sequence
  synthetic construct
  misc_feature (1)..(3): linked via phosphorothioate
  modified_base (1)..(1): 5'-methoxyphosphonate-4-oxy modified
  modified_base (2)..(2): 2'-fluoro modified
  modified_base (3)..(3): 2'-fluoro modified
  modified_base (4)..(4): 2'-fluoro modified
  modified_base (5)..(5): 2'-fluoro modified
  modified_base (6)..(6): 2'-O-methyl modified
  modified_base (7)..(7): 2'-fluoro modified
  modified_base (8)..(8): 2'-O-methyl modified
  modified_base (9)..(9): 2'-O-methyl modified
  modified_base (10)..(10): 2'-fluoro modified
  modified_base (11)..(11): 2'-O-methyl modified
  modified_base (12)..(12): 2'-O-methyl modified
  modified_base (13)..(13): 2'-O-methyl modified
  modified_base (14)..(14): 2'-fluoro modified
  modified_base (15)..(15): 2'-O-methyl modified
  modified_base (16)..(16): 2'-O-methyl modified
  modified_base (17)..(17): 2'-O-methyl modified
  modified_base (18)..(18): 2'-O-methyl modified
  modified_base (19)..(19): 2'-O-methyl modified
  misc_feature (20)..(22): linked via phosphorothioate
  modified_base (20)..(20): 2'-O-methyl modified
  modified_base (21)..(21): 2'-O-methyl modified
  modified_base (22)..(22): 2'-O-methyl modified
uaaaaucuggaaccacaaaggg

SEQ ID NO: 1165 - RNA, 22 nt, Artificial Sequence
  synthetic construct
  misc_feature (1)..(3): linked via phosphorothioate
  modified_base (1)..(1): 5'-methoxyphosphonate-4-oxy modified
  modified_base (2)..(2): 2'-fluoro modified
  modified_base (3)..(3): 2'-fluoro modified
  modified_base (4)..(4): 2'-fluoro modified
  modified_base (5)..(5): 2'-fluoro modified
  modified_base (6)..(6): 2'-O-methyl modified
  modified_base (7)..(7): 2'-fluoro modified
  modified_base (8)..(8): 2'-O-methyl modified
  modified_base (9)..(9): 2'-O-methyl modified
  modified_base (10)..(10): 2'-fluoro modified
  modified_base (11)..(11): 2'-O-methyl modified
  modified_base (12)..(12): 2'-O-methyl modified
  modified_base (13)..(13): 2'-O-methyl modified
  modified_base (14)..(14): 2'-fluoro modified
  modified_base (15)..(15): 2'-O-methyl modified
  modified_base (16)..(16): 2'-O-methyl modified
  modified_base (17)..(17): 2'-O-methyl modified
  modified_base (18)..(18): 2'-O-methyl modified
  modified_base (19)..(19): 2'-O-methyl modified
  misc_feature (20)..(22): linked via phosphorothioate
  modified_base (20)..(20): 2'-O-methyl modified
  modified_base (21)..(21): 2'-O-methyl modified
  modified_base (22)..(22): 2'-O-methyl modified
uacaauaauauaaauuuuuagg

SEQ ID NO: 1166 - RNA, 22 nt, Artificial Sequence
  synthetic construct
  misc_feature (1)..(3): linked via phosphorothioate
  modified_base (1)..(1): 5'-methoxyphosphonate-4-oxy modified
  modified_base (2)..(2): 2'-fluoro modified
  modified_base (3)..(3): 2'-fluoro modified
  modified_base (4)..(4): 2'-fluoro modified
  modified_base (5)..(5): 2'-fluoro modified
  modified_base (6)..(6): 2'-O-methyl modified
  modified_base (7)..(7): 2'-fluoro modified
  modified_base (8)..(8): 2'-O-methyl modified
  modified_base (9)..(9): 2'-O-methyl modified
  modified_base (10)..(10): 2'-fluoro modified
  modified_base (11)..(11): 2'-O-methyl modified
  modified_base (12)..(12): 2'-O-methyl modified
  modified_base (13)..(13): 2'-O-methyl modified
  modified_base (14)..(14): 2'-fluoro modified
  modified_base (15)..(15): 2'-O-methyl modified
  modified_base (16)..(16): 2'-O-methyl modified
  modified_base (17)..(17): 2'-O-methyl modified
  modified_base (18)..(18): 2'-O-methyl modified
  modified_base (19)..(19): 2'-O-methyl modified
  misc_feature (20)..(22): linked via phosphorothioate
  modified_base (20)..(20): 2'-O-methyl modified
  modified_base (21)..(21): 2'-O-methyl modified
  modified_base (22)..(22): 2'-O-methyl modified
uuuccaaacugcaucaaugagg

SEQ ID NO: 1167 - RNA, 22 nt, Artificial Sequence
  synthetic construct
  misc_feature (1)..(3): linked via phosphorothioate
  modified_base (1)..(1): 5'-methoxyphosphonate-4-oxy modified
  modified_base (2)..(2): 2'-fluoro modified
  modified_base (3)..(3): 2'-fluoro modified
  modified_base (4)..(4): 2'-fluoro modified
  modified_base (5)..(5): 2'-fluoro modified
  modified_base (6)..(6): 2'-O-methyl modified
  modified_base (7)..(7): 2'-fluoro modified
  modified_base (8)..(8): 2'-O-methyl modified
  modified_base (9)..(9): 2'-O-methyl modified
  modified_base (10)..(10): 2'-fluoro modified
  modified_base (11)..(11): 2'-O-methyl modified
  modified_base (12)..(12): 2'-O-methyl modified
  modified_base (13)..(13): 2'-O-methyl modified
  modified_base (14)..(14): 2'-fluoro modified
  modified_base (15)..(15): 2'-O-methyl modified
  modified_base (16)..(16): 2'-O-methyl modified
  modified_base (17)..(17): 2'-O-methyl modified
  modified_base (18)..(18): 2'-O-methyl modified
  modified_base (19)..(19): 2'-O-methyl modified
  misc_feature (20)..(22): linked via phosphorothioate
  modified_base (20)..(20): 2'-O-methyl modified
  modified_base (21)..(21): 2'-O-methyl modified
  modified_base (22)..(22): 2'-O-methyl modified
uccaugaugauuucagcaaagg

SEQ ID NO: 1168 - RNA, 22 nt, Artificial Sequence
  synthetic construct
  misc_feature (1)..(3): linked via phosphorothioate
  modified_base (1)..(1): 5'-methoxyphosphonate-4-oxy modified
  modified_base (2)..(2): 2'-fluoro modified
  modified_base (3)..(3): 2'-fluoro modified
  modified_base (4)..(4): 2'-fluoro modified
  modified_base (5)..(5): 2'-fluoro modified
  modified_base (6)..(6): 2'-O-methyl modified
  modified_base (7)..(7): 2'-fluoro modified
  modified_base (8)..(8): 2'-O-methyl modified
  modified_base (9)..(9): 2'-O-methyl modified
  modified_base (10)..(10): 2'-fluoro modified
  modified_base (11)..(11): 2'-O-methyl modified
  modified_base (12)..(12): 2'-O-methyl modified
  modified_base (13)..(13): 2'-O-methyl modified
  modified_base (14)..(14): 2'-fluoro modified
  modified_base (15)..(15): 2'-O-methyl modified
  modified_base (16)..(16): 2'-O-methyl modified
  modified_base (17)..(17): 2'-O-methyl modified
  modified_base (18)..(18): 2'-O-methyl modified
  modified_base (19)..(19): 2'-O-methyl modified
  misc_feature (20)..(22): linked via phosphorothioate
  modified_base (20)..(20): 2'-O-methyl modified
  modified_base (21)..(21): 2'-O-methyl modified
  modified_base (22)..(22): 2'-O-methyl modified
uagcaaaugacauguuguucgg

SEQ ID NO: 1169 - RNA, 22 nt, Artificial Sequence
  synthetic construct
  misc_feature (1)..(3): linked via phosphorothioate
  modified_base (1)..(1): 5'-methoxyphosphonate-4-oxy modified
  modified_base (2)..(2): 2'-fluoro modified
  modified_base (3)..(3): 2'-fluoro modified
  modified_base (4)..(4): 2'-fluoro modified
  modified_base (5)..(5): 2'-fluoro modified
  modified_base (6)..(6): 2'-O-methyl modified
  modified_base (7)..(7): 2'-fluoro modified
  modified_base (8)..(8): 2'-O-methyl modified
  modified_base (9)..(9): 2'-O-methyl modified
  modified_base (10)..(10): 2'-fluoro modified
  modified_base (11)..(11): 2'-O-methyl modified
  modified_base (12)..(12): 2'-O-methyl modified
  modified_base (13)..(13): 2'-O-methyl modified
  modified_base (14)..(14): 2'-fluoro modified
  modified_base (15)..(15): 2'-O-methyl modified
  modified_base (16)..(16): 2'-O-methyl modified
  modified_base (17)..(17): 2'-O-methyl modified
  modified_base (18)..(18): 2'-O-methyl modified
  modified_base (19)..(19): 2'-O-methyl modified
  misc_feature (20)..(22): linked via phosphorothioate
  modified_base (20)..(20): 2'-O-methyl modified
  modified_base (21)..(21): 2'-O-methyl modified
  modified_base (22)..(22): 2'-O-methyl modified
uucagcaaaugacauguugugg

SEQ ID NO: 1170 - RNA, 22 nt, Artificial Sequence
  synthetic construct
  misc_feature (1)..(3): linked via phosphorothioate
  modified_base (1)..(1): 5'-methoxyphosphonate-4-oxy modified
  modified_base (2)..(2): 2'-fluoro modified
  modified_base (3)..(3): 2'-fluoro modified
  modified_base (4)..(4): 2'-fluoro modified
  modified_base (5)..(5): 2'-fluoro modified
  modified_base (6)..(6): 2'-O-methyl modified
  modified_base (7)..(7): 2'-fluoro modified
  modified_base (8)..(8): 2'-O-methyl modified
  modified_base (9)..(9): 2'-O-methyl modified
  modified_base (10)..(10): 2'-fluoro modified
  modified_base (11)..(11): 2'-O-methyl modified
  modified_base (12)..(12): 2'-O-methyl modified
  modified_base (13)..(13): 2'-O-methyl modified
  modified_base (14)..(14): 2'-fluoro modified
  modified_base (15)..(15): 2'-O-methyl modified
  modified_base (16)..(16): 2'-O-methyl modified
  modified_base (17)..(17): 2'-O-methyl modified
  modified_base (18)..(18): 2'-O-methyl modified
  modified_base (19)..(19): 2'-O-methyl modified
  misc_feature (20)..(22): linked via phosphorothioate
  modified_base (20)..(20): 2'-O-methyl modified
  modified_base (21)..(21): 2'-O-methyl modified
  modified_base (22)..(22): 2'-O-methyl modified
ucagcaaaugacauguuguugg

SEQ ID NO: 1171 - RNA, 22 nt, Artificial Sequence
  synthetic construct
  misc_feature (1)..(3): linked via phosphorothioate
  modified_base (1)..(1): 5'-methoxyphosphonate-4-oxy modified
  modified_base (2)..(2): 2'-fluoro modified
  modified_base (3)..(3): 2'-fluoro modified
  modified_base (4)..(4): 2'-fluoro modified
  modified_base (5)..(5): 2'-fluoro modified
  modified_base (6)..(6): 2'-O-methyl modified
  modified_base (7)..(7): 2'-fluoro modified
  modified_base (8)..(8): 2'-O-methyl modified
  modified_base (9)..(9): 2'-O-methyl modified
  modified_base (10)..(10): 2'-fluoro modified
  modified_base (11)..(11): 2'-O-methyl modified
  modified_base (12)..(12): 2'-O-methyl modified
  modified_base (13)..(13): 2'-O-methyl modified
  modified_base (14)..(14): 2'-fluoro modified
  modified_base (15)..(15): 2'-O-methyl modified
  modified_base (16)..(16): 2'-O-methyl modified
  modified_base (17)..(17): 2'-O-methyl modified
  modified_base (18)..(18): 2'-O-methyl modified
  modified_base (19)..(19): 2'-O-methyl modified
  misc_feature (20)..(22): linked via phosphorothioate
  modified_base (20)..(20): 2'-O-methyl modified
  modified_base (21)..(21): 2'-O-methyl modified
  modified_base (22)..(22): 2'-O-methyl modified
ugaaacugcuugauucuucggg

SEQ ID NO: 1172 - RNA, 22 nt, Artificial Sequence
  synthetic construct
  misc_feature (1)..(3): linked via phosphorothioate
  modified_base (1)..(1): 5'-methoxyphosphonate-4-oxy modified
  modified_base (2)..(2): 2'-fluoro modified
  modified_base (3)..(3): 2'-fluoro modified
  modified_base (4)..(4): 2'-fluoro modified
  modified_base (5)..(5): 2'-fluoro modified
  modified_base (6)..(6): 2'-O-methyl modified
  modified_base (7)..(7): 2'-fluoro modified
  modified_base (8)..(8): 2'-O-methyl modified
  modified_base (9)..(9): 2'-O-methyl modified
  modified_base (10)..(10): 2'-fluoro modified
  modified_base (11)..(11): 2'-O-methyl modified
  modified_base (12)..(12): 2'-O-methyl modified
  modified_base (13)..(13): 2'-O-methyl modified
  modified_base (14)..(14): 2'-fluoro modified
  modified_base (15)..(15): 2'-O-methyl modified
  modified_base (16)..(16): 2'-O-methyl modified
  modified_base (17)..(17): 2'-O-methyl modified
  modified_base (18)..(18): 2'-O-methyl modified
  modified_base (19)..(19): 2'-O-methyl modified
  misc_feature (20)..(22): linked via phosphorothioate
  modified_base (20)..(20): 2'-O-methyl modified
  modified_base (21)..(21): 2'-O-methyl modified
  modified_base (22)..(22): 2'-O-methyl modified
uaucaccacaacuggcaagggg

SEQ ID NO: 1173 - RNA, 22 nt, Artificial Sequence
  synthetic construct
  misc_feature (1)..(3): linked via phosphorothioate
  modified_base (1)..(1): 5'-methoxyphosphonate-4-oxy modified
  modified_base (2)..(2): 2'-fluoro modified
  modified_base (3)..(3): 2'-fluoro modified
  modified_base (4)..(4): 2'-fluoro modified
  modified_base (5)..(5): 2'-fluoro modified
  modified_base (6)..(6): 2'-O-methyl modified
  modified_base (7)..(7): 2'-fluoro modified
  modified_base (8)..(8): 2'-O-methyl modified
  modified_base (9)..(9): 2'-O-methyl modified
  modified_base (10)..(10): 2'-fluoro modified
  modified_base (11)..(11): 2'-O-methyl modified
  modified_base (12)..(12): 2'-O-methyl modified
  modified_base (13)..(13): 2'-O-methyl modified
  modified_base (14)..(14): 2'-fluoro modified
  modified_base (15)..(15): 2'-O-methyl modified
  modified_base (16)..(16): 2'-O-methyl modified
  modified_base (17)..(17): 2'-O-methyl modified
  modified_base (18)..(18): 2'-O-methyl modified
  modified_base (19)..(19): 2'-O-methyl modified
  misc_feature (20)..(22): linked via phosphorothioate
  modified_base (20)..(20): 2'-O-methyl modified
  modified_base (21)..(21): 2'-O-methyl modified
  modified_base (22)..(22): 2'-O-methyl modified
uuccaguuucuuaauuuguugg

SEQ ID NO: 1174 - RNA, 22 nt, Artificial Sequence
  synthetic construct
  misc_feature (1)..(3): linked via phosphorothioate
  modified_base (1)..(1): 5'-methoxyphosphonate-4-oxy modified
  modified_base (2)..(2): 2'-fluoro modified
  modified_base (3)..(3): 2'-fluoro modified
  modified_base (4)..(4): 2'-fluoro modified
  modified_base (5)..(5): 2'-fluoro modified
  modified_base (6)..(6): 2'-O-methyl modified
  modified_base (7)..(7): 2'-fluoro modified
  modified_base (8)..(8): 2'-O-methyl modified
  modified_base (9)..(9): 2'-O-methyl modified
  modified_base (10)..(10): 2'-fluoro modified
  modified_base (11)..(11): 2'-O-methyl modified
  modified_base (12)..(12): 2'-O-methyl modified
  modified_base (13)..(13): 2'-O-methyl modified
  modified_base (14)..(14): 2'-fluoro modified
  modified_base (15)..(15): 2'-O-methyl modified
  modified_base (16)..(16): 2'-O-methyl modified
  modified_base (17)..(17): 2'-O-methyl modified
  modified_base (18)..(18): 2'-O-methyl modified
  modified_base (19)..(19): 2'-O-methyl modified
  misc_feature (20)..(22): linked via phosphorothioate
  modified_base (20)..(20): 2'-O-methyl modified
  modified_base (21)..(21): 2'-O-methyl modified
  modified_base (22)..(22): 2'-O-methyl modified
uacugguuguuuccauucaggg

SEQ ID NO: 1175 - RNA, 22 nt, Artificial Sequence
  synthetic construct
  misc_feature (1)..(3): linked via phosphorothioate
  modified_base (1)..(1): 5'-methoxyphosphonate-4-oxy modified
  modified_base (2)..(2): 2'-fluoro modified
  modified_base (3)..(3): 2'-fluoro modified
  modified_base (4)..(4): 2'-fluoro modified
  modified_base (5)..(5): 2'-fluoro modified
  modified_base (6)..(6): 2'-O-methyl modified
  modified_base (7)..(7): 2'-fluoro modified
  modified_base (8)..(8): 2'-O-methyl modified
  modified_base (9)..(9): 2'-O-methyl modified
  modified_base (10)..(10): 2'-fluoro modified
  modified_base (11)..(11): 2'-O-methyl modified
  modified_base (12)..(12): 2'-O-methyl modified
  modified_base (13)..(13): 2'-O-methyl modified
  modified_base (14)..(14): 2'-fluoro modified
  modified_base (15)..(15): 2'-O-methyl modified
  modified_base (16)..(16): 2'-O-methyl modified
  modified_base (17)..(17): 2'-O-methyl modified
  modified_base (18)..(18): 2'-O-methyl modified
  modified_base (19)..(19): 2'-O-methyl modified
  misc_feature (20)..(22): linked via phosphorothioate
  modified_base (20)..(20): 2'-O-methyl modified
  modified_base (21)..(21): 2'-O-methyl modified
  modified_base (22)..(22): 2'-O-methyl modified
uuccauuggcuucucaagaugg

SEQ ID NO: 1176 - RNA, 22 nt, Artificial Sequence
  synthetic construct
  misc_feature (1)..(3): linked via phosphorothioate
  modified_base (1)..(1): 5'-methoxyphosphonate-4-oxy modified
  modified_base (2)..(2): 2'-fluoro modified
  modified_base (3)..(3): 2'-fluoro modified
  modified_base (4)..(4): 2'-fluoro modified
  modified_base (5)..(5): 2'-fluoro modified
  modified_base (6)..(6): 2'-O-methyl modified
  modified_base (7)..(7): 2'-fluoro modified
  modified_base (8)..(8): 2'-O-methyl modified
  modified_base (9)..(9): 2'-O-methyl modified
  modified_base (10)..(10): 2'-fluoro modified
  modified_base (11)..(11): 2'-O-methyl modified
  modified_base (12)..(12): 2'-O-methyl modified
  modified_base (13)..(13): 2'-O-methyl modified
  modified_base (14)..(14): 2'-fluoro modified
  modified_base (15)..(15): 2'-O-methyl modified
  modified_base (16)..(16): 2'-O-methyl modified
  modified_base (17)..(17): 2'-O-methyl modified
  modified_base (18)..(18): 2'-O-methyl modified
  modified_base (19)..(19): 2'-O-methyl modified
  misc_feature (20)..(22): linked via phosphorothioate
  modified_base (20)..(20): 2'-O-methyl modified
  modified_base (21)..(21): 2'-O-methyl modified
  modified_base (22)..(22): 2'-O-methyl modified
uagaaacugcuugauucuucgg

SEQ ID NO: 1177 - RNA, 22 nt, Artificial Sequence
  synthetic construct
  misc_feature (1)..(3): linked via phosphorothioate
  modified_base (1)..(1): 5'-methoxyphosphonate-4-oxy modified
  modified_base (2)..(2): 2'-fluoro modified
  modified_base (3)..(3): 2'-fluoro modified
  modified_base (4)..(4): 2'-fluoro modified
  modified_base (5)..(5): 2'-fluoro modified
  modified_base (6)..(6): 2'-O-methyl modified
  modified_base (7)..(7): 2'-fluoro modified
  modified_base (8)..(8): 2'-O-methyl modified
  modified_base (9)..(9): 2'-O-methyl modified
  modified_base (10)..(10): 2'-fluoro modified
  modified_base (11)..(11): 2'-O-methyl modified
  modified_base (12)..(12): 2'-O-methyl modified
  modified_base (13)..(13): 2'-O-methyl modified
  modified_base (14)..(14): 2'-fluoro modified
  modified_base (15)..(15): 2'-O-methyl modified
  modified_base (16)..(16): 2'-O-methyl modified
  modified_base (17)..(17): 2'-O-methyl modified
  modified_base (18)..(18): 2'-O-methyl modified
  modified_base (19)..(19): 2'-O-methyl modified
  misc_feature (20)..(22): linked via phosphorothioate
  modified_base (20)..(20): 2'-O-methyl modified
  modified_base (21)..(21): 2'-O-methyl modified
  modified_base (22)..(22): 2'-O-methyl modified
uagaucaccacaacuggcaagg

SEQ ID NO: 1178 - RNA, 22 nt, Artificial Sequence
  synthetic construct
  misc_feature (1)..(3): linked via phosphorothioate
  modified_base (1)..(1): 5'-methoxyphosphonate-4-oxy modified
  modified_base (2)..(2): 2'-fluoro modified
  modified_base (3)..(3): 2'-fluoro modified
  modified_base (4)..(4): 2'-fluoro modified
  modified_base (5)..(5): 2'-fluoro modified
  modified_base (6)..(6): 2'-O-methyl modified
  modified_base (7)..(7): 2'-fluoro modified
  modified_base (8)..(8): 2'-O-methyl modified
  modified_base (9)..(9): 2'-O-methyl modified
  modified_base (10)..(10): 2'-fluoro modified
  modified_base (11)..(11): 2'-O-methyl modified
  modified_base (12)..(12): 2'-O-methyl modified
  modified_base (13)..(13): 2'-O-methyl modified
  modified_base (14)..(14): 2'-fluoro modified
  modified_base (15)..(15): 2'-O-methyl modified
  modified_base (16)..(16): 2'-O-methyl modified
  modified_base (17)..(17): 2'-O-methyl modified
  modified_base (18)..(18): 2'-O-methyl modified
  modified_base (19)..(19): 2'-O-methyl modified
  misc_feature (20)..(22): linked via phosphorothioate
  modified_base (20)..(20): 2'-O-methyl modified
  modified_base (21)..(21): 2'-O-methyl modified
  modified_base (22)..(22): 2'-O-methyl modified
uugguuguuuccauucagaugg

SEQ ID NO: 1179 - RNA, 22 nt, Artificial Sequence
  synthetic construct
  misc_feature (1)..(3): linked via phosphorothioate
  modified_base (1)..(1): 5'-methoxyphosphonate-4-oxy modified
  modified_base (2)..(2): 2'-fluoro modified
  modified_base (3)..(3): 2'-fluoro modified
  modified_base (4)..(4): 2'-fluoro modified
  modified_base (5)..(5): 2'-fluoro modified
  modified_base (6)..(6): 2'-O-methyl modified
  modified_base (7)..(7): 2'-fluoro modified
  modified_base (8)..(8): 2'-O-methyl modified
  modified_base (9)..(9): 2'-O-methyl modified
  modified_base (10)..(10): 2'-fluoro modified
  modified_base (11)..(11): 2'-O-methyl modified
  modified_base (12)..(12): 2'-O-methyl modified
  modified_base (13)..(13): 2'-O-methyl modified
  modified_base (14)..(14): 2'-fluoro modified
  modified_base (15)..(15): 2'-O-methyl modified
  modified_base (16)..(16): 2'-O-methyl modified
  modified_base (17)..(17): 2'-O-methyl modified
  modified_base (18)..(18): 2'-O-methyl modified
  modified_base (19)..(19): 2'-O-methyl modified
  misc_feature (20)..(22): linked via phosphorothioate
  modified_base (20)..(20): 2'-O-methyl modified
  modified_base (21)..(21): 2'-O-methyl modified
  modified_base (22)..(22): 2'-O-methyl modified
uuucauuuucuguucuagaugg

SEQ ID NO: 1180 - RNA, 22 nt, Artificial Sequence
  synthetic construct
  misc_feature (1)..(3): linked via phosphorothioate
  modified_base (1)..(1): 5'-methoxyphosphonate-4-oxy modified
  modified_base (2)..(2): 2'-fluoro modified
  modified_base (3)..(3): 2'-fluoro modified
  modified_base (4)..(4): 2'-fluoro modified
  modified_base (5)..(5): 2'-fluoro modified
  modified_base (6)..(6): 2'-O-methyl modified
  modified_base (7)..(7): 2'-fluoro modified
  modified_base (8)..(8): 2'-O-methyl modified
  modified_base (9)..(9): 2'-O-methyl modified
  modified_base (10)..(10): 2'-fluoro modified
  modified_base (11)..(11): 2'-O-methyl modified
  modified_base (12)..(12): 2'-O-methyl modified
  modified_base (13)..(13): 2'-O-methyl modified
  modified_base (14)..(14): 2'-fluoro modified
  modified_base (15)..(15): 2'-O-methyl modified
  modified_base (16)..(16): 2'-O-methyl modified
  modified_base (17)..(17): 2'-O-methyl modified
  modified_base (18)..(18): 2'-O-methyl modified
  modified_base (19)..(19): 2'-O-methyl modified
  misc_feature (20)..(22): linked via phosphorothioate
  modified_base (20)..(20): 2'-O-methyl modified
  modified_base (21)..(21): 2'-O-methyl modified
  modified_base (22)..(22): 2'-O-methyl modified
uauuuucuguucuagauccugg

SEQ ID NO: 1181 - RNA, 22 nt, Artificial Sequence
  synthetic construct
  misc_feature (1)..(3): linked via phosphorothioate
  modified_base (1)..(1): 5'-methoxyphosphonate-4-oxy modified
  modified_base (2)..(2): 2'-fluoro modified
  modified_base (3)..(3): 2'-fluoro modified
  modified_base (4)..(4): 2'-fluoro modified
  modified_base (5)..(5): 2'-fluoro modified
  modified_base (6)..(6): 2'-O-methyl modified
  modified_base (7)..(7): 2'-fluoro modified
  modified_base (8)..(8): 2'-O-methyl modified
  modified_base (9)..(9): 2'-O-methyl modified
  modified_base (10)..(10): 2'-fluoro modified
  modified_base (11)..(11): 2'-O-methyl modified
  modified_base (12)..(12): 2'-O-methyl modified
  modified_base (13)..(13): 2'-O-methyl modified
  modified_base (14)..(14): 2'-fluoro modified
  modified_base (15)..(15): 2'-O-methyl modified
  modified_base (16)..(16): 2'-O-methyl modified
  modified_base (17)..(17): 2'-O-methyl modified
  modified_base (18)..(18): 2'-O-methyl modified
  modified_base (19)..(19): 2'-O-methyl modified
  misc_feature (20)..(22): linked via phosphorothioate
  modified_base (20)..(20): 2'-O-methyl modified
  modified_base (21)..(21): 2'-O-methyl modified
  modified_base (22)..(22): 2'-O-methyl modified
ucacaauaauauaaauuuuugg

SEQ ID NO: 1182 - RNA, 22 nt, Artificial Sequence
  synthetic construct
  misc_feature (1)..(3): linked via phosphorothioate
  modified_base (1)..(1): 5'-methoxyphosphonate-4-oxy modified
  modified_base (2)..(2): 2'-fluoro modified
  modified_base (3)..(3): 2'-fluoro modified
  modified_base (4)..(4): 2'-fluoro modified
  modified_base (5)..(5): 2'-fluoro modified
  modified_base (6)..(6): 2'-O-methyl modified
  modified_base (7)..(7): 2'-fluoro modified
  modified_base (8)..(8): 2'-O-methyl modified
  modified_base (9)..(9): 2'-O-methyl modified
  modified_base (10)..(10): 2'-fluoro modified
  modified_base (11)..(11): 2'-O-methyl modified
  modified_base (12)..(12): 2'-O-methyl modified
  modified_base (13)..(13): 2'-O-methyl modified
  modified_base (14)..(14): 2'-fluoro modified
  modified_base (15)..(15): 2'-O-methyl modified
  modified_base (16)..(16): 2'-O-methyl modified
  modified_base (17)..(17): 2'-O-methyl modified
  modified_base (18)..(18): 2'-O-methyl modified
  modified_base (19)..(19): 2'-O-methyl modified
  misc_feature (20)..(22): linked via phosphorothioate
  modified_base (20)..(20): 2'-O-methyl modified
  modified_base (21)..(21): 2'-O-methyl modified
  modified_base (22)..(22): 2'-O-methyl modified
uauaauauaaauuuuuacacgg

SEQ ID NO: 1183 - RNA, 22 nt, Artificial Sequence
  synthetic construct
  misc_feature (1)..(3): linked via phosphorothioate
  modified_base (1)..(1): 5'-methoxyphosphonate-4-oxy modified
  modified_base (2)..(2): 2'-fluoro modified
  modified_base (3)..(3): 2'-fluoro modified
  modified_base (4)..(4): 2'-fluoro modified
  modified_base (5)..(5): 2'-fluoro modified
  modified_base (6)..(6): 2'-O-methyl modified
  modified_base (7)..(7): 2'-fluoro modified
  modified_base (8)..(8): 2'-O-methyl modified
  modified_base (9)..(9): 2'-O-methyl modified
  modified_base (10)..(10): 2'-fluoro modified
  modified_base (11)..(11): 2'-O-methyl modified
  modified_base (12)..(12): 2'-O-methyl modified
  modified_base (13)..(13): 2'-O-methyl modified
  modified_base (14)..(14): 2'-fluoro modified
  modified_base (15)..(15): 2'-O-methyl modified
  modified_base (16)..(16): 2'-O-methyl modified
  modified_base (17)..(17): 2'-O-methyl modified
  modified_base (18)..(18): 2'-O-methyl modified
  modified_base (19)..(19): 2'-O-methyl modified
  misc_feature (20)..(22): linked via phosphorothioate
  modified_base (20)..(20): 2'-O-methyl modified
  modified_base (21)..(21): 2'-O-methyl modified
  modified_base (22)..(22): 2'-O-methyl modified
ugaaacuuuuugcugcaacugg

SEQ ID NO: 1184 - RNA, 22 nt, Artificial Sequence
  synthetic construct
  misc_feature (1)..(3): linked via phosphorothioate
  modified_base (1)..(1): 5'-methoxyphosphonate-4-oxy modified
  modified_base (2)..(2): 2'-fluoro modified
  modified_base (3)..(3): 2'-fluoro modified
  modified_base (4)..(4): 2'-fluoro modified
  modified_base (5)..(5): 2'-fluoro modified
  modified_base (6)..(6): 2'-O-methyl modified
  modified_base (7)..(7): 2'-fluoro modified
  modified_base (8)..(8): 2'-O-methyl modified
  modified_base (9)..(9): 2'-O-methyl modified
  modified_base (10)..(10): 2'-fluoro modified
  modified_base (11)..(11): 2'-O-methyl modified
  modified_base (12)..(12): 2'-O-methyl modified
  modified_base (13)..(13): 2'-O-methyl modified
  modified_base (14)..(14): 2'-fluoro modified
  modified_base (15)..(15): 2'-O-methyl modified
  modified_base (16)..(16): 2'-O-methyl modified
  modified_base (17)..(17): 2'-O-methyl modified
  modified_base (18)..(18): 2'-O-methyl modified
  modified_base (19)..(19): 2'-O-methyl modified
  misc_feature (20)..(22): linked via phosphorothioate
  modified_base (20)..(20): 2'-O-methyl modified
  modified_base (21)..(21): 2'-O-methyl modified
  modified_base (22)..(22): 2'-O-methyl modified
uuaaaaaaguuuacauucuugg

SEQ ID NO: 1185 - RNA, 22 nt, Artificial Sequence
  synthetic construct
  misc_feature (1)..(3): linked via phosphorothioate
  modified_base (1)..(1): 5'-methoxyphosphonate-4-oxy modified
  modified_base (2)..(2): 2'-fluoro modified
  modified_base (3)..(3): 2'-fluoro modified
  modified_base (4)..(4): 2'-fluoro modified
  modified_base (5)..(5): 2'-fluoro modified
  modified_base (6)..(6): 2'-O-methyl modified
  modified_base (7)..(7): 2'-fluoro modified
  modified_base (8)..(8): 2'-O-methyl modified
  modified_base (9)..(9): 2'-O-methyl modified
  modified_base (10)..(10): 2'-fluoro modified
  modified_base (11)..(11): 2'-O-methyl modified
  modified_base (12)..(12): 2'-O-methyl modified
  modified_base (13)..(13): 2'-O-methyl modified
  modified_base (14)..(14): 2'-fluoro modified
  modified_base (15)..(15): 2'-O-methyl modified
  modified_base (16)..(16): 2'-O-methyl modified
  modified_base (17)..(17): 2'-O-methyl modified
  modified_base (18)..(18): 2'-O-methyl modified
  modified_base (19)..(19): 2'-O-methyl modified
  misc_feature (20)..(22): linked via phosphorothioate
  modified_base (20)..(20): 2'-O-methyl modified
  modified_base (21)..(21): 2'-O-methyl modified
  modified_base (22)..(22): 2'-O-methyl modified
uagaacauucgacucuugcagg

SEQ ID NO: 1186 - RNA, 22 nt, Artificial Sequence
  synthetic construct
  misc_feature (1)..(3): linked via phosphorothioate
  modified_base (1)..(1): 5'-methoxyphosphonate-4-oxy modified
  modified_base (2)..(2): 2'-fluoro modified
  modified_base (3)..(3): 2'-fluoro modified
  modified_base (4)..(4): 2'-fluoro modified
  modified_base (5)..(5): 2'-fluoro modified
  modified_base (6)..(6): 2'-O-methyl modified
  modified_base (7)..(7): 2'-fluoro modified
  modified_base (8)..(8): 2'-O-methyl modified
  modified_base (9)..(9): 2'-O-methyl modified
  modified_base (10)..(10): 2'-fluoro modified
  modified_base (11)..(11): 2'-O-methyl modified
  modified_base (12)..(12): 2'-O-methyl modified
  modified_base (13)..(13): 2'-O-methyl modified
  modified_base (14)..(14): 2'-fluoro modified
  modified_base (15)..(15): 2'-O-methyl modified
  modified_base (16)..(16): 2'-O-methyl modified
  modified_base (17)..(17): 2'-O-methyl modified
  modified_base (18)..(18): 2'-O-methyl modified
  modified_base (19)..(19): 2'-O-methyl modified
  misc_feature (20)..(22): linked via phosphorothioate
  modified_base (20)..(20): 2'-O-methyl modified
  modified_base (21)..(21): 2'-O-methyl modified
  modified_base (22)..(22): 2'-O-methyl modified
uaaacugcaucaaugaaucugg

SEQ ID NO: 1187 - RNA, 22 nt, Artificial Sequence
  synthetic construct
  misc_feature (1)..(3): linked via phosphorothioate
  modified_base (1)..(1): 5'-methoxyphosphonate-4-oxy modified
  modified_base (2)..(2): 2'-fluoro modified
  modified_base (3)..(3): 2'-fluoro modified
  modified_base (4)..(4): 2'-fluoro modified
  modified_base (5)..(5): 2'-fluoro modified
  modified_base (6)..(6): 2'-O-methyl modified
  modified_base (7)..(7): 2'-fluoro modified
  modified_base (8)..(8): 2'-O-methyl modified
  modified_base (9)..(9): 2'-O-methyl modified
  modified_base (10)..(10): 2'-fluoro modified
  modified_base (11)..(11): 2'-O-methyl modified
  modified_base (12)..(12): 2'-O-methyl modified
  modified_base (13)..(13): 2'-O-methyl modified
  modified_base (14)..(14): 2'-fluoro modified
  modified_base (15)..(15): 2'-O-methyl modified
  modified_base (16)..(16): 2'-O-methyl modified
  modified_base (17)..(17): 2'-O-methyl modified
  modified_base (18)..(18): 2'-O-methyl modified
  modified_base (19)..(19): 2'-O-methyl modified
  misc_feature (20)..(22): linked via phosphorothioate
  modified_base (20)..(20): 2'-O-methyl modified
  modified_base (21)..(21): 2'-O-methyl modified
  modified_base (22)..(22): 2'-O-methyl modified
uaaacuuuuugcugcaacucgg

SEQ ID NO: 1188 - RNA, 22 nt, Artificial Sequence
  synthetic construct
  misc_feature (1)..(3): linked via phosphorothioate
  modified_base (1)..(1): 5'-methoxyphosphonate-4-oxy modified
  modified_base (2)..(2): 2'-fluoro modified
  modified_base (3)..(3): 2'-fluoro modified
  modified_base (4)..(4): 2'-fluoro modified
  modified_base (5)..(5): 2'-fluoro modified
  modified_base (6)..(6): 2'-O-methyl modified
  modified_base (7)..(7): 2'-fluoro modified
  modified_base (8)..(8): 2'-O-methyl modified
  modified_base (9)..(9): 2'-O-methyl modified
  modified_base (10)..(10): 2'-fluoro modified
  modified_base (11)..(11): 2'-O-methyl modified
  modified_base (12)..(12): 2'-O-methyl modified
  modified_base (13)..(13): 2'-O-methyl modified
  modified_base (14)..(14): 2'-fluoro modified
  modified_base (15)..(15): 2'-O-methyl modified
  modified_base (16)..(16): 2'-O-methyl modified
  modified_base (17)..(17): 2'-O-methyl modified
  modified_base (18)..(18): 2'-O-methyl modified
  modified_base (19)..(19): 2'-O-methyl modified
  misc_feature (20)..(22): linked via phosphorothioate
  modified_base (20)..(20): 2'-O-methyl modified
  modified_base (21)..(21): 2'-O-methyl modified
  modified_base (22)..(22): 2'-O-methyl modified
ucugauagagaacauucgacgg

SEQ ID NO: 1189 - RNA, 22 nt, Artificial Sequence
  synthetic construct
  misc_feature (1)..(3): linked via phosphorothioate
  modified_base (1)..(1): 5'-methoxyphosphonate-4-oxy modified
  modified_base (2)..(2): 2'-fluoro modified
  modified_base (3)..(3): 2'-fluoro modified
  modified_base (4)..(4): 2'-fluoro modified
  modified_base (5)..(5): 2'-fluoro modified
  modified_base (6)..(6): 2'-O-methyl modified
  modified_base (7)..(7): 2'-fluoro modified
  modified_base (8)..(8): 2'-O-methyl modified
  modified_base (9)..(9): 2'-O-methyl modified
  modified_base (10)..(10): 2'-fluoro modified
  modified_base (11)..(11): 2'-O-methyl modified
  modified_base (12)..(12): 2'-O-methyl modified
  modified_base (13)..(13): 2'-O-methyl modified
  modified_base (14)..(14): 2'-fluoro modified
  modified_base (15)..(15): 2'-O-methyl modified
  modified_base (16)..(16): 2'-O-methyl modified
  modified_base (17)..(17): 2'-O-methyl modified
  modified_base (18)..(18): 2'-O-methyl modified
  modified_base (19)..(19): 2'-O-methyl modified
  misc_feature (20)..(22): linked via phosphorothioate
  modified_base (20)..(20): 2'-O-methyl modified
  modified_base (21)..(21): 2'-O-methyl modified
  modified_base (22)..(22): 2'-O-methyl modified
uaaaaguuuacauucuuggggg

SEQ ID NO: 1190 - RNA, 22 nt, Artificial Sequence
  synthetic construct
  misc_feature (1)..(3): linked via phosphorothioate
  modified_base (1)..(1): 5'-methoxyphosphonate-4-oxy modified
  modified_base (2)..(2): 2'-fluoro modified
  modified_base (3)..(3): 2'-fluoro modified
  modified_base (4)..(4): 2'-fluoro modified
  modified_base (5)..(5): 2'-fluoro modified
  modified_base (6)..(6): 2'-O-methyl modified
  modified_base (7)..(7): 2'-fluoro modified
  modified_base (8)..(8): 2'-O-methyl modified
  modified_base (9)..(9): 2'-O-methyl modified
  modified_base (10)..(10): 2'-fluoro modified
  modified_base (11)..(11): 2'-O-methyl modified
  modified_base (12)..(12): 2'-O-methyl modified
  modified_base (13)..(13): 2'-O-methyl modified
  modified_base (14)..(14): 2'-fluoro modified
  modified_base (15)..(15): 2'-O-methyl modified
  modified_base (16)..(16): 2'-O-methyl modified
  modified_base (17)..(17): 2'-O-methyl modified
  modified_base (18)..(18): 2'-O-methyl modified
  modified_base (19)..(19): 2'-O-methyl modified
  misc_feature (20)..(22): linked via phosphorothioate
  modified_base (20)..(20): 2'-O-methyl modified
  modified_base (21)..(21): 2'-O-methyl modified
  modified_base (22)..(22): 2'-O-methyl modified
uauucuuccauguucaucacgg

SEQ ID NO: 1191 - RNA, 22 nt, Artificial Sequence
  synthetic construct
  misc_feature (1)..(3): linked via phosphorothioate
  modified_base (1)..(1): 5'-methoxyphosphonate-4-oxy modified
  modified_base (2)..(2): 2'-fluoro modified
  modified_base (3)..(3): 2'-fluoro modified
  modified_base (4)..(4): 2'-fluoro modified
  modified_base (5)..(5): 2'-fluoro modified
  modified_base (6)..(6): 2'-O-methyl modified
  modified_base (7)..(7): 2'-fluoro modified
  modified_base (8)..(8): 2'-O-methyl modified
  modified_base (9)..(9): 2'-O-methyl modified
  modified_base (10)..(10): 2'-fluoro modified
  modified_base (11)..(11): 2'-O-methyl modified
  modified_base (12)..(12): 2'-O-methyl modified
  modified_base (13)..(13): 2'-O-methyl modified
  modified_base (14)..(14): 2'-fluoro modified
  modified_base (15)..(15): 2'-O-methyl modified
  modified_base (16)..(16): 2'-O-methyl modified
  modified_base (17)..(17): 2'-O-methyl modified
  modified_base (18)..(18): 2'-O-methyl modified
  modified_base (19)..(19): 2'-O-methyl modified
  misc_feature (20)..(22): linked via phosphorothioate
  modified_base (20)..(20): 2'-O-methyl modified
  modified_base (21)..(21): 2'-O-methyl modified
  modified_base (22)..(22): 2'-O-methyl modified
uuagagaacauucgacucuugg

SEQ ID NO: 1192 - RNA, 22 nt, Artificial Sequence
  synthetic construct
  misc_feature (1)..(3): linked via phosphorothioate
  modified_base (1)..(1): 5'-methoxyphosphonate-4-oxy modified
  modified_base (2)..(2): 2'-fluoro modified
  modified_base (3)..(3): 2'-fluoro modified
  modified_base (4)..(4): 2'-fluoro modified
  modified_base (5)..(5): 2'-fluoro modified
  modified_base (6)..(6): 2'-O-methyl modified
  modified_base (7)..(7): 2'-fluoro modified
  modified_base (8)..(8): 2'-O-methyl modified
  modified_base (9)..(9): 2'-O-methyl modified
  modified_base (10)..(10): 2'-fluoro modified
  modified_base (11)..(11): 2'-O-methyl modified
  modified_base (12)..(12): 2'-O-methyl modified
  modified_base (13)..(13): 2'-O-methyl modified
  modified_base (14)..(14): 2'-fluoro modified
  modified_base (15)..(15): 2'-O-methyl modified
  modified_base (16)..(16): 2'-O-methyl modified
  modified_base (17)..(17): 2'-O-methyl modified
  modified_base (18)..(18): 2'-O-methyl modified
  modified_base (19)..(19): 2'-O-methyl modified
  misc_feature (20)..(22): linked via phosphorothioate
  modified_base (20)..(20): 2'-O-methyl modified
  modified_base (21)..(21): 2'-O-methyl modified
  modified_base (22)..(22): 2'-O-methyl modified
ucaaacugcaucaaugaaucgg

SEQ ID NO: 1193 - RNA, 22 nt, Artificial Sequence
  synthetic construct
  misc_feature (1)..(3): linked via phosphorothioate
  modified_base (1)..(1): 5'-methoxyphosphonate-4-oxy modified
  modified_base (2)..(2): 2'-fluoro modified
  modified_base (3)..(3): 2'-fluoro modified
  modified_base (4)..(4): 2'-fluoro modified
  modified_base (5)..(5): 2'-fluoro modified
  modified_base (6)..(6): 2'-O-methyl modified
  modified_base (7)..(7): 2'-fluoro modified
  modified_base (8)..(8): 2'-O-methyl modified
  modified_base (9)..(9): 2'-O-methyl modified
  modified_base (10)..(10): 2'-fluoro modified
  modified_base (11)..(11): 2'-O-methyl modified
  modified_base (12)..(12): 2'-O-methyl modified
  modified_base (13)..(13): 2'-O-methyl modified
  modified_base (14)..(14): 2'-fluoro modified
  modified_base (15)..(15): 2'-O-methyl modified
  modified_base (16)..(16): 2'-O-methyl modified
  modified_base (17)..(17): 2'-O-methyl modified
  modified_base (18)..(18): 2'-O-methyl modified
  modified_base (19)..(19): 2'-O-methyl modified
  misc_feature (20)..(22): linked via phosphorothioate
  modified_base (20)..(20): 2'-O-methyl modified
  modified_base (21)..(21): 2'-O-methyl modified
  modified_base (22)..(22): 2'-O-methyl modified
uauagagaacauucgacucugg

SEQ ID NO: 1194 - RNA, 22 nt, Artificial Sequence
  synthetic construct
  misc_feature (1)..(3): linked via phosphorothioate
  modified_base (1)..(1): 5'-methoxyphosphonate-4-oxy modified
  modified_base (2)..(2): 2'-fluoro modified
  modified_base (3)..(3): 2'-fluoro modified
  modified_base (4)..(4): 2'-fluoro modified
  modified_base (5)..(5): 2'-fluoro modified
  modified_base (6)..(6): 2'-O-methyl modified
  modified_base (7)..(7): 2'-fluoro modified
  modified_base (8)..(8): 2'-O-methyl modified
  modified_base (9)..(9): 2'-O-methyl modified
  modified_base (10)..(10): 2'-fluoro modified
  modified_base (11)..(11): 2'-O-methyl modified
  modified_base (12)..(12): 2'-O-methyl modified
  modified_base (13)..(13): 2'-O-methyl modified
  modified_base (14)..(14): 2'-fluoro modified
  modified_base (15)..(15): 2'-O-methyl modified
  modified_base (16)..(16): 2'-O-methyl modified
  modified_base (17)..(17): 2'-O-methyl modified
  modified_base (18)..(18): 2'-O-methyl modified
  modified_base (19)..(19): 2'-O-methyl modified
  misc_feature (20)..(22): linked via phosphorothioate
  modified_base (20)..(20): 2'-O-methyl modified
  modified_base (21)..(21): 2'-O-methyl modified
  modified_base (22)..(22): 2'-O-methyl modified
uugauagagaacauucgacugg

SEQ ID NO: 1195 - RNA, 22 nt, Artificial Sequence
  synthetic construct
  misc_feature (1)..(3): linked via phosphorothioate
  modified_base (1)..(1): 5'-methoxyphosphonate-4-oxy modified
  modified_base (2)..(2): 2'-fluoro modified
  modified_base (3)..(3): 2'-fluoro modified
  modified_base (4)..(4): 2'-fluoro modified
  modified_base (5)..(5): 2'-fluoro modified
  modified_base (6)..(6): 2'-O-methyl modified
  modified_base (7)..(7): 2'-fluoro modified
  modified_base (8)..(8): 2'-O-methyl modified
  modified_base (9)..(9): 2'-O-methyl modified
  modified_base (10)..(10): 2'-fluoro modified
  modified_base (11)..(11): 2'-O-methyl modified
  modified_base (12)..(12): 2'-O-methyl modified
  modified_base (13)..(13): 2'-O-methyl modified
  modified_base (14)..(14): 2'-fluoro modified
  modified_base (15)..(15): 2'-O-methyl modified
  modified_base (16)..(16): 2'-O-methyl modified
  modified_base (17)..(17): 2'-O-methyl modified
  modified_base (18)..(18): 2'-O-methyl modified
  modified_base (19)..(19): 2'-O-methyl modified
  misc_feature (20)..(22): linked via phosphorothioate
  modified_base (20)..(20): 2'-O-methyl modified
  modified_base (21)..(21): 2'-O-methyl modified
  modified_base (22)..(22): 2'-O-methyl modified
uccugaauaauucacaccaggg

SEQ ID NO: 1196 - RNA, 22 nt, Artificial Sequence
  synthetic construct
  misc_feature (1)..(3): linked via phosphorothioate
  modified_base (1)..(1): 5'-methoxyphosphonate-4-oxy modified
  modified_base (2)..(2): 2'-fluoro modified
  modified_base (3)..(3): 2'-fluoro modified
  modified_base (4)..(4): 2'-fluoro modified
  modified_base (5)..(5): 2'-fluoro modified
  modified_base (6)..(6): 2'-O-methyl modified
  modified_base (7)..(7): 2'-fluoro modified
  modified_base (8)..(8): 2'-O-methyl modified
  modified_base (9)..(9): 2'-O-methyl modified
  modified_base (10)..(10): 2'-fluoro modified
  modified_base (11)..(11): 2'-O-methyl modified
  modified_base (12)..(12): 2'-O-methyl modified
  modified_base (13)..(13): 2'-O-methyl modified
  modified_base (14)..(14): 2'-fluoro modified
  modified_base (15)..(15): 2'-O-methyl modified
  modified_base (16)..(16): 2'-O-methyl modified
  modified_base (17)..(17): 2'-O-methyl modified
  modified_base (18)..(18): 2'-O-methyl modified
  modified_base (19)..(19): 2'-O-methyl modified
  misc_feature (20)..(22): linked via phosphorothioate
  modified_base (20)..(20): 2'-O-methyl modified
  modified_base (21)..(21): 2'-O-methyl modified
  modified_base (22)..(22): 2'-O-methyl modified
uaacauucgacucuugcagggg

SEQ ID NO: 1197 - RNA, 22 nt, Artificial Sequence
  synthetic construct
  misc_feature (1)..(3): linked via phosphorothioate
  modified_base (1)..(1): 5'-methoxyphosphonate-4-oxy modified
  modified_base (2)..(2): 2'-fluoro modified
  modified_base (3)..(3): 2'-fluoro modified
  modified_base (4)..(4): 2'-fluoro modified
  modified_base (5)..(5): 2'-fluoro modified
  modified_base (6)..(6): 2'-O-methyl modified
  modified_base (7)..(7): 2'-fluoro modified
  modified_base (8)..(8): 2'-O-methyl modified
  modified_base (9)..(9): 2'-O-methyl modified
  modified_base (10)..(10): 2'-fluoro modified
  modified_base (11)..(11): 2'-O-methyl modified
  modified_base (12)..(12): 2'-O-methyl modified
  modified_base (13)..(13): 2'-O-methyl modified
  modified_base (14)..(14): 2'-fluoro modified
  modified_base (15)..(15): 2'-O-methyl modified
  modified_base (16)..(16): 2'-O-methyl modified
  modified_base (17)..(17): 2'-O-methyl modified
  modified_base (18)..(18): 2'-O-methyl modified
  modified_base (19)..(19): 2'-O-methyl modified
  misc_feature (20)..(22): linked via phosphorothioate
  modified_base (20)..(20): 2'-O-methyl modified
  modified_base (21)..(21): 2'-O-methyl modified
  modified_base (22)..(22): 2'-O-methyl modified
uugaaucuuagcaggaaggugg

SEQ ID NO: 1198 - RNA, 22 nt, Artificial Sequence
  synthetic construct
  misc_feature (1)..(3): linked via phosphorothioate
  modified_base (1)..(1): 5'-methoxyphosphonate-4-oxy modified
  modified_base (2)..(2): 2'-fluoro modified
  modified_base (3)..(3): 2'-fluoro modified
  modified_base (4)..(4): 2'-fluoro modified
  modified_base (5)..(5): 2'-fluoro modified
  modified_base (6)..(6): 2'-O-methyl modified
  modified_base (7)..(7): 2'-fluoro modified
  modified_base (8)..(8): 2'-O-methyl modified
  modified_base (9)..(9): 2'-O-methyl modified
  modified_base (10)..(10): 2'-fluoro modified
  modified_base (11)..(11): 2'-O-methyl modified
  modified_base (12)..(12): 2'-O-methyl modified
  modified_base (13)..(13): 2'-O-methyl modified
  modified_base (14)..(14): 2'-fluoro modified
  modified_base (15)..(15): 2'-O-methyl modified
  modified_base (16)..(16): 2'-O-methyl modified
  modified_base (17)..(17): 2'-O-methyl modified
  modified_base (18)..(18): 2'-O-methyl modified
  modified_base (19)..(19): 2'-O-methyl modified
  misc_feature (20)..(22): linked via phosphorothioate
  modified_base (20)..(20): 2'-O-methyl modified
  modified_base (21)..(21): 2'-O-methyl modified
  modified_base (22)..(22): 2'-O-methyl modified
uugaauaauucacaccaggugg

SEQ ID NO: 1199 - RNA, 22 nt, Artificial Sequence
  synthetic construct
  misc_feature (1)..(3): linked via phosphorothioate
  modified_base (1)..(1): 5'-methoxyphosphonate-4-oxy modified
  modified_base (2)..(2): 2'-fluoro modified
  modified_base (3)..(3): 2'-fluoro modified
  modified_base (4)..(4): 2'-fluoro modified
  modified_base (5)..(5): 2'-fluoro modified
  modified_base (6)..(6): 2'-O-methyl modified
  modified_base (7)..(7): 2'-fluoro modified
  modified_base (8)..(8): 2'-O-methyl modified
  modified_base (9)..(9): 2'-O-methyl modified
  modified_base (10)..(10): 2'-fluoro modified
  modified_base (11)..(11): 2'-O-methyl modified
  modified_base (12)..(12): 2'-O-methyl modified
  modified_base (13)..(13): 2'-O-methyl modified
  modified_base (14)..(14): 2'-fluoro modified
  modified_base (15)..(15): 2'-O-methyl modified
  modified_base (16)..(16): 2'-O-methyl modified
  modified_base (17)..(17): 2'-O-methyl modified
  modified_base (18)..(18): 2'-O-methyl modified
  modified_base (19)..(19): 2'-O-methyl modified
  misc_feature (20)..(22): linked via phosphorothioate
  modified_base (20)..(20): 2'-O-methyl modified
  modified_base (21)..(21): 2'-O-methyl modified
  modified_base (22)..(22): 2'-O-methyl modified
uguaaaaaaguuuacauucugg

SEQ ID NO: 1200 - RNA, 22 nt, Artificial Sequence
  synthetic construct
  misc_feature (1)..(3): linked via phosphorothioate
  modified_base (1)..(1): 5'-methoxyphosphonate-4-oxy modified
  modified_base (2)..(2): 2'-fluoro modified
  modified_base (3)..(3): 2'-fluoro modified
  modified_base (4)..(4): 2'-fluoro modified
  modified_base (5)..(5): 2'-fluoro modified
  modified_base (6)..(6): 2'-O-methyl modified
  modified_base (7)..(7): 2'-fluoro modified
  modified_base (8)..(8): 2'-O-methyl modified
  modified_base (9)..(9): 2'-O-methyl modified
  modified_base (10)..(10): 2'-fluoro modified
  modified_base (11)..(11): 2'-O-methyl modified
  modified_base (12)..(12): 2'-O-methyl modified
  modified_base (13)..(13): 2'-O-methyl modified
  modified_base (14)..(14): 2'-fluoro modified
  modified_base (15)..(15): 2'-O-methyl modified
  modified_base (16)..(16): 2'-O-methyl modified
  modified_base (17)..(17): 2'-O-methyl modified
  modified_base (18)..(18): 2'-O-methyl modified
  modified_base (19)..(19): 2'-O-methyl modified
  misc_feature (20)..(22): linked via phosphorothioate
  modified_base (20)..(20): 2'-O-methyl modified
  modified_base (21)..(21): 2'-O-methyl modified
  modified_base (22)..(22): 2'-O-methyl modified
uugacuuuaguagugaacuggg

SEQ ID NO: 1201 - RNA, 22 nt, Artificial Sequence
  synthetic construct
  misc_feature (1)..(3): linked via phosphorothioate
  modified_base (1)..(1): 5'-methoxyphosphonate-4-oxy modified
  modified_base (2)..(2): 2'-fluoro modified
  modified_base (3)..(3): 2'-fluoro modified
  modified_base (4)..(4): 2'-fluoro modified
  modified_base (5)..(5): 2'-fluoro modified
  modified_base (6)..(6): 2'-O-methyl modified
  modified_base (7)..(7): 2'-fluoro modified
  modified_base (8)..(8): 2'-O-methyl modified
  modified_base (9)..(9): 2'-O-methyl modified
  modified_base (10)..(10): 2'-fluoro modified
  modified_base (11)..(11): 2'-O-methyl modified
  modified_base (12)..(12): 2'-O-methyl modified
  modified_base (13)..(13): 2'-O-methyl modified
  modified_base (14)..(14): 2'-fluoro modified
  modified_base (15)..(15): 2'-O-methyl modified
  modified_base (16)..(16): 2'-O-methyl modified
  modified_base (17)..(17): 2'-O-methyl modified
  modified_base (18)..(18): 2'-O-methyl modified
  modified_base (19)..(19): 2'-O-methyl modified
  misc_feature (20)..(22): linked via phosphorothioate
  modified_base (20)..(20): 2'-O-methyl modified
  modified_base (21)..(21): 2'-O-methyl modified
  modified_base (22)..(22): 2'-O-methyl modified
uugacuuuaguagugaacuggg

SEQ ID NO: 1202 - RNA, 22 nt, Artificial Sequence
  synthetic construct
  misc_feature (1)..(3): linked via phosphorothioate
  modified_base (1)..(1): 5'-methoxyphosphonate-4-oxy modified
  modified_base (2)..(2): 2'-fluoro modified
  modified_base (3)..(3): 2'-fluoro modified
  modified_base (4)..(4): 2'-fluoro modified
  modified_base (5)..(5): 2'-fluoro modified
  modified_base (6)..(6): 2'-O-methyl modified
  modified_base (7)..(7): 2'-fluoro modified
  modified_base (8)..(8): 2'-O-methyl modified
  modified_base (9)..(9): 2'-O-methyl modified
  modified_base (10)..(10): 2'-fluoro modified
  modified_base (11)..(11): 2'-O-methyl modified
  modified_base (12)..(12): 2'-O-methyl modified
  modified_base (13)..(13): 2'-O-methyl modified
  modified_base (14)..(14): 2'-fluoro modified
  modified_base (15)..(15): 2'-O-methyl modified
  modified_base (16)..(16): 2'-O-methyl modified
  modified_base (17)..(17): 2'-O-methyl modified
  modified_base (18)..(18): 2'-O-methyl modified
  modified_base (19)..(19): 2'-O-methyl modified
  misc_feature (20)..(22): linked via phosphorothioate
  modified_base (20)..(20): 2'-O-methyl modified
  modified_base (21)..(21): 2'-O-methyl modified
  modified_base (22)..(22): 2'-O-methyl modified
ugaacauucgacucuugcaggg

SEQ ID NO: 1203 - RNA, 22 nt, Artificial Sequence
  synthetic construct
  misc_feature (1)..(3): linked via phosphorothioate
  modified_base (1)..(1): 5'-methoxyphosphonate-4-oxy modified
  modified_base (2)..(2): 2'-fluoro modified
  modified_base (3)..(3): 2'-fluoro modified
  modified_base (4)..(4): 2'-fluoro modified
  modified_base (5)..(5): 2'-fluoro modified
  modified_base (6)..(6): 2'-O-methyl modified
  modified_base (7)..(7): 2'-fluoro modified
  modified_base (8)..(8): 2'-O-methyl modified
  modified_base (9)..(9): 2'-O-methyl modified
  modified_base (10)..(10): 2'-fluoro modified
  modified_base (11)..(11): 2'-O-methyl modified
  modified_base (12)..(12): 2'-O-methyl modified
  modified_base (13)..(13): 2'-O-methyl modified
  modified_base (14)..(14): 2'-fluoro modified
  modified_base (15)..(15): 2'-O-methyl modified
  modified_base (16)..(16): 2'-O-methyl modified
  modified_base (17)..(17): 2'-O-methyl modified
  modified_base (18)..(18): 2'-O-methyl modified
  modified_base (19)..(19): 2'-O-methyl modified
  misc_feature (20)..(22): linked via phosphorothioate
  modified_base (20)..(20): 2'-O-methyl modified
  modified_base (21)..(21): 2'-O-methyl modified
  modified_base (22)..(22): 2'-O-methyl modified
uacccugaauaauucacaccgg

SEQ ID NO: 1204 - RNA, 22 nt, Artificial Sequence
  synthetic construct
  misc_feature (1)..(3): linked via phosphorothioate
  modified_base (1)..(1): 5'-methoxyphosphonate-4-oxy modified
  modified_base (2)..(2): 2'-fluoro modified
  modified_base (3)..(3): 2'-fluoro modified
  modified_base (4)..(4): 2'-fluoro modified
  modified_base (5)..(5): 2'-fluoro modified
  modified_base (6)..(6): 2'-O-methyl modified
  modified_base (7)..(7): 2'-fluoro modified
  modified_base (8)..(8): 2'-O-methyl modified
  modified_base (9)..(9): 2'-O-methyl modified
  modified_base (10)..(10): 2'-fluoro modified
  modified_base (11)..(11): 2'-O-methyl modified
  modified_base (12)..(12): 2'-O-methyl modified
  modified_base (13)..(13): 2'-O-methyl modified
  modified_base (14)..(14): 2'-fluoro modified
  modified_base (15)..(15): 2'-O-methyl modified
  modified_base (16)..(16): 2'-O-methyl modified
  modified_base (17)..(17): 2'-O-methyl modified
  modified_base (18)..(18): 2'-O-methyl modified
  modified_base (19)..(19): 2'-O-methyl modified
  misc_feature (20)..(22): linked via phosphorothioate
  modified_base (20)..(20): 2'-O-methyl modified
  modified_base (21)..(21): 2'-O-methyl modified
  modified_base (22)..(22): 2'-O-methyl modified
uaaaaaguuuacauucuugggg

SEQ ID NO: 1205 - RNA, 22 nt, Artificial Sequence
  synthetic construct
  misc_feature (1)..(3): linked via phosphorothioate
  modified_base (1)..(1): 5'-methoxyphosphonate-4-oxy modified
  modified_base (2)..(2): 2'-fluoro modified
  modified_base (3)..(3): 2'-fluoro modified
  modified_base (4)..(4): 2'-fluoro modified
  modified_base (5)..(5): 2'-fluoro modified
  modified_base (6)..(6): 2'-O-methyl modified
  modified_base (7)..(7): 2'-fluoro modified
  modified_base (8)..(8): 2'-O-methyl modified
  modified_base (9)..(9): 2'-O-methyl modified
  modified_base (10)..(10): 2'-fluoro modified
  modified_base (11)..(11): 2'-O-methyl modified
  modified_base (12)..(12): 2'-O-methyl modified
  modified_base (13)..(13): 2'-O-methyl modified
  modified_base (14)..(14): 2'-fluoro modified
  modified_base (15)..(15): 2'-O-methyl modified
  modified_base (16)..(16): 2'-O-methyl modified
  modified_base (17)..(17): 2'-O-methyl modified
  modified_base (18)..(18): 2'-O-methyl modified
  modified_base (19)..(19): 2'-O-methyl modified
  misc_feature (20)..(22): linked via phosphorothioate
  modified_base (20)..(20): 2'-O-methyl modified
  modified_base (21)..(21): 2'-O-methyl modified
  modified_base (22)..(22): 2'-O-methyl modified
uauguuguucagcugcugcugg

SEQ ID NO: 1206 - RNA, 22 nt, Artificial Sequence
  synthetic construct
  misc_feature (1)..(3): linked via phosphorothioate
  modified_base (1)..(1): 5'-methoxyphosphonate-4-oxy modified
  modified_base (2)..(2): 2'-fluoro modified
  modified_base (3)..(3): 2'-fluoro modified
  modified_base (4)..(4): 2'-fluoro modified
  modified_base (5)..(5): 2'-fluoro modified
  modified_base (6)..(6): 2'-O-methyl modified
  modified_base (7)..(7): 2'-fluoro modified
  modified_base (8)..(8): 2'-O-methyl modified
  modified_base (9)..(9): 2'-O-methyl modified
  modified_base (10)..(10): 2'-fluoro modified
  modified_base (11)..(11): 2'-O-methyl modified
  modified_base (12)..(12): 2'-O-methyl modified
  modified_base (13)..(13): 2'-O-methyl modified
  modified_base (14)..(14): 2'-fluoro modified
  modified_base (15)..(15): 2'-O-methyl modified
  modified_base (16)..(16): 2'-O-methyl modified
  modified_base (17)..(17): 2'-O-methyl modified
  modified_base (18)..(18): 2'-O-methyl modified
  modified_base (19)..(19): 2'-O-methyl modified
  misc_feature (20)..(22): linked via phosphorothioate
  modified_base (20)..(20): 2'-O-methyl modified
  modified_base (21)..(21): 2'-O-methyl modified
  modified_base (22)..(22): 2'-O-methyl modified
uaaaugacauguuguucagcgg

SEQ ID NO: 1207 - RNA, 22 nt, Artificial Sequence
  synthetic construct
  misc_feature (1)..(3): linked via phosphorothioate
  modified_base (1)..(1): 5'-methoxyphosphonate-4-oxy modified
  modified_base (2)..(2): 2'-fluoro modified
  modified_base (3)..(3): 2'-fluoro modified
  modified_base (4)..(4): 2'-fluoro modified
  modified_base (5)..(5): 2'-fluoro modified
  modified_base (6)..(6): 2'-O-methyl modified
  modified_base (7)..(7): 2'-fluoro modified
  modified_base (8)..(8): 2'-O-methyl modified
  modified_base (9)..(9): 2'-O-methyl modified
  modified_base (10)..(10): 2'-fluoro modified
  modified_base (11)..(11): 2'-O-methyl modified
  modified_base (12)..(12): 2'-O-methyl modified
  modified_base (13)..(13): 2'-O-methyl modified
  modified_base (14)..(14): 2'-fluoro modified
  modified_base (15)..(15): 2'-O-methyl modified
  modified_base (16)..(16): 2'-O-methyl modified
  modified_base (17)..(17): 2'-O-methyl modified
  modified_base (18)..(18): 2'-O-methyl modified
  modified_base (19)..(19): 2'-O-methyl modified
  misc_feature (20)..(22): linked via phosphorothioate
  modified_base (20)..(20): 2'-O-methyl modified
  modified_base (21)..(21): 2'-O-methyl modified
  modified_base (22)..(22): 2'-O-methyl modified
ucaaaugacauguuguucaggg

SEQ ID NO: 1208 - RNA, 22 nt, Artificial Sequence
  synthetic construct
  misc_feature (1)..(3): linked via phosphorothioate
  modified_base (1)..(1): 5'-methoxyphosphonate-4-oxy modified
  modified_base (2)..(2): 2'-fluoro modified
  modified_base (3)..(3): 2'-fluoro modified
  modified_base (4)..(4): 2'-fluoro modified
  modified_base (5)..(5): 2'-fluoro modified
  modified_base (6)..(6): 2'-O-methyl modified
  modified_base (7)..(7): 2'-fluoro modified
  modified_base (8)..(8): 2'-O-methyl modified
  modified_base (9)..(9): 2'-O-methyl modified
  modified_base (10)..(10): 2'-fluoro modified
  modified_base (11)..(11): 2'-O-methyl modified
  modified_base (12)..(12): 2'-O-methyl modified
  modified_base (13)..(13): 2'-O-methyl modified
  modified_base (14)..(14): 2'-fluoro modified
  modified_base (15)..(15): 2'-O-methyl modified
  modified_base (16)..(16): 2'-O-methyl modified
  modified_base (17)..(17): 2'-O-methyl modified
  modified_base (18)..(18): 2'-O-methyl modified
  modified_base (19)..(19): 2'-O-methyl modified
  misc_feature (20)..(22): linked via phosphorothioate
  modified_base (20)..(20): 2'-O-methyl modified
  modified_base (21)..(21): 2'-O-methyl modified
  modified_base (22)..(22): 2'-O-methyl modified
uacauguuguucagcugcuggg

SEQ ID NO: 1209 - RNA, 22 nt, Artificial Sequence
  synthetic construct
  misc_feature (1)..(3): linked via phosphorothioate
  modified_base (1)..(1): 5'-methoxyphosphonate-4-oxy modified
  modified_base (2)..(2): 2'-fluoro modified
  modified_base (3)..(3): 2'-fluoro modified
  modified_base (4)..(4): 2'-fluoro modified
  modified_base (5)..(5): 2'-fluoro modified
  modified_base (6)..(6): 2'-O-methyl modified
  modified_base (7)..(7): 2'-fluoro modified
  modified_base (8)..(8): 2'-O-methyl modified
  modified_base (9)..(9): 2'-O-methyl modified
  modified_base (10)..(10): 2'-fluoro modified
  modified_base (11)..(11): 2'-O-methyl modified
  modified_base (12)..(12): 2'-O-methyl modified
  modified_base (13)..(13): 2'-O-methyl modified
  modified_base (14)..(14): 2'-fluoro modified
  modified_base (15)..(15): 2'-O-methyl modified
  modified_base (16)..(16): 2'-O-methyl modified
  modified_base (17)..(17): 2'-O-methyl modified
  modified_base (18)..(18): 2'-O-methyl modified
  modified_base (19)..(19): 2'-O-methyl modified
  misc_feature (20)..(22): linked via phosphorothioate
  modified_base (20)..(20): 2'-O-methyl modified
  modified_base (21)..(21): 2'-O-methyl modified
  modified_base (22)..(22): 2'-O-methyl modified
uuuuauuucuggaaguuaaagg

SEQ ID NO: 1210 - RNA, 22 nt, Artificial Sequence
  synthetic construct
  misc_feature (1)..(3): linked via phosphorothioate
  modified_base (1)..(1): 5'-methoxyphosphonate-4-oxy modified
  modified_base (2)..(2): 2'-fluoro modified
  modified_base (3)..(3): 2'-fluoro modified
  modified_base (4)..(4): 2'-fluoro modified
  modified_base (5)..(5): 2'-fluoro modified
  modified_base (6)..(6): 2'-O-methyl modified
  modified_base (7)..(7): 2'-fluoro modified
  modified_base (8)..(8): 2'-O-methyl modified
  modified_base (9)..(9): 2'-O-methyl modified
  modified_base (10)..(10): 2'-fluoro modified
  modified_base (11)..(11): 2'-O-methyl modified
  modified_base (12)..(12): 2'-O-methyl modified
  modified_base (13)..(13): 2'-O-methyl modified
  modified_base (14)..(14): 2'-fluoro modified
  modified_base (15)..(15): 2'-O-methyl modified
  modified_base (16)..(16): 2'-O-methyl modified
  modified_base (17)..(17): 2'-O-methyl modified
  modified_base (18)..(18): 2'-O-methyl modified
  modified_base (19)..(19): 2'-O-methyl modified
  misc_feature (20)..(22): linked via phosphorothioate
  modified_base (20)..(20): 2'-O-methyl modified
  modified_base (21)..(21): 2'-O-methyl modified
  modified_base (22)..(22): 2'-O-methyl modified
ugacauguuguucagcugcugg

SEQ ID NO: 1211 - RNA, 22 nt, Artificial Sequence
  synthetic construct
  misc_feature (1)..(3): linked via phosphorothioate
  modified_base (1)..(1): 5'-methoxyphosphonate-4-oxy modified
  modified_base (2)..(2): 2'-fluoro modified
  modified_base (3)..(3): 2'-fluoro modified
  modified_base (4)..(4): 2'-fluoro modified
  modified_base (5)..(5): 2'-fluoro modified
  modified_base (6)..(6): 2'-O-methyl modified
  modified_base (7)..(7): 2'-fluoro modified
  modified_base (8)..(8): 2'-O-methyl modified
  modified_base (9)..(9): 2'-O-methyl modified
  modified_base (10)..(10): 2'-fluoro modified
  modified_base (11)..(11): 2'-O-methyl modified
  modified_base (12)..(12): 2'-O-methyl modified
  modified_base (13)..(13): 2'-O-methyl modified
  modified_base (14)..(14): 2'-fluoro modified
  modified_base (15)..(15): 2'-O-methyl modified
  modified_base (16)..(16): 2'-O-methyl modified
  modified_base (17)..(17): 2'-O-methyl modified
  modified_base (18)..(18): 2'-O-methyl modified
  modified_base (19)..(19): 2'-O-methyl modified
  misc_feature (20)..(22): linked via phosphorothioate
  modified_base (20)..(20): 2'-O-methyl modified
  modified_base (21)..(21): 2'-O-methyl modified
  modified_base (22)..(22): 2'-O-methyl modified
uuauuuccaaacugcaucaagg

SEQ ID NO: 1212 - RNA, 22 nt, Artificial Sequence
  synthetic construct
  misc_feature (1)..(3): linked via phosphorothioate
  modified_base (1)..(1): 5'-methoxyphosphonate-4-oxy modified
  modified_base (2)..(2): 2'-fluoro modified
  modified_base (3)..(3): 2'-fluoro modified
  modified_base (4)..(4): 2'-fluoro modified
  modified_base (5)..(5): 2'-fluoro modified
  modified_base (6)..(6): 2'-O-methyl modified
  modified_base (7)..(7): 2'-fluoro modified
  modified_base (8)..(8): 2'-O-methyl modified
  modified_base (9)..(9): 2'-O-methyl modified
  modified_base (10)..(10): 2'-fluoro modified
  modified_base (11)..(11): 2'-O-methyl modified
  modified_base (12)..(12): 2'-O-methyl modified
  modified_base (13)..(13): 2'-O-methyl modified
  modified_base (14)..(14): 2'-fluoro modified
  modified_base (15)..(15): 2'-O-methyl modified
  modified_base (16)..(16): 2'-O-methyl modified
  modified_base (17)..(17): 2'-O-methyl modified
  modified_base (18)..(18): 2'-O-methyl modified
  modified_base (19)..(19): 2'-O-methyl modified
  misc_feature (20)..(22): linked via phosphorothioate
  modified_base (20)..(20): 2'-O-methyl modified
  modified_base (21)..(21): 2'-O-methyl modified
  modified_base (22)..(22): 2'-O-methyl modified
ugcaaaugacauguuguucagg

SEQ ID NO: 1213 - RNA, 22 nt, Artificial Sequence
  synthetic construct
  misc_feature (1)..(3): linked via phosphorothioate
  modified_base (1)..(1): 5'-methoxyphosphonate-4-oxy modified
  modified_base (2)..(2): 2'-fluoro modified
  modified_base (3)..(3): 2'-fluoro modified
  modified_base (4)..(4): 2'-fluoro modified
  modified_base (5)..(5): 2'-fluoro modified
  modified_base (6)..(6): 2'-O-methyl modified
  modified_base (7)..(7): 2'-fluoro modified
  modified_base (8)..(8): 2'-O-methyl modified
  modified_base (9)..(9): 2'-O-methyl modified
  modified_base (10)..(10): 2'-fluoro modified
  modified_base (11)..(11): 2'-O-methyl modified
  modified_base (12)..(12): 2'-O-methyl modified
  modified_base (13)..(13): 2'-O-methyl modified
  modified_base (14)..(14): 2'-fluoro modified
  modified_base (15)..(15): 2'-O-methyl modified
  modified_base (16)..(16): 2'-O-methyl modified
  modified_base (17)..(17): 2'-O-methyl modified
  modified_base (18)..(18): 2'-O-methyl modified
  modified_base (19)..(19): 2'-O-methyl modified
  misc_feature (20)..(22): linked via phosphorothioate
  modified_base (20)..(20): 2'-O-methyl modified
  modified_base (21)..(21): 2'-O-methyl modified
  modified_base (22)..(22): 2'-O-methyl modified
uaauauaaauuuuuacacuagg

SEQ ID NO: 1214 - RNA, 22 nt, Artificial Sequence
  synthetic construct
  misc_feature (1)..(3): linked via phosphorothioate
  modified_base (1)..(1): 5'-methoxyphosphonate-4-oxy modified
  modified_base (2)..(2): 2'-fluoro modified
  modified_base (3)..(3): 2'-fluoro modified
  modified_base (4)..(4): 2'-fluoro modified
  modified_base (5)..(5): 2'-fluoro modified
  modified_base (6)..(6): 2'-O-methyl modified
  modified_base (7)..(7): 2'-fluoro modified
  modified_base (8)..(8): 2'-O-methyl modified
  modified_base (9)..(9): 2'-O-methyl modified
  modified_base (10)..(10): 2'-fluoro modified
  modified_base (11)..(11): 2'-O-methyl modified
  modified_base (12)..(12): 2'-O-methyl modified
  modified_base (13)..(13): 2'-O-methyl modified
  modified_base (14)..(14): 2'-fluoro modified
  modified_base (15)..(15): 2'-O-methyl modified
  modified_base (16)..(16): 2'-O-methyl modified
  modified_base (17)..(17): 2'-O-methyl modified
  modified_base (18)..(18): 2'-O-methyl modified
  modified_base (19)..(19): 2'-O-methyl modified
  misc_feature (20)..(22): linked via phosphorothioate
  modified_base (20)..(20): 2'-O-methyl modified
  modified_base (21)..(21): 2'-O-methyl modified
  modified_base (22)..(22): 2'-O-methyl modified
uaucuggaaccacaaaguuagg

SEQ ID NO: 1215 - RNA, 22 nt, Artificial Sequence
  synthetic construct
  misc_feature (1)..(3): linked via phosphorothioate
  modified_base (1)..(1): 5'-methoxyphosphonate-4-oxy modified
  modified_base (2)..(2): 2'-fluoro modified
  modified_base (3)..(3): 2'-fluoro modified
  modified_base (4)..(4): 2'-fluoro modified
  modified_base (5)..(5): 2'-fluoro modified
  modified_base (6)..(6): 2'-O-methyl modified
  modified_base (7)..(7): 2'-fluoro modified
  modified_base (8)..(8): 2'-O-methyl modified
  modified_base (9)..(9): 2'-O-methyl modified
  modified_base (10)..(10): 2'-fluoro modified
  modified_base (11)..(11): 2'-O-methyl modified
  modified_base (12)..(12): 2'-O-methyl modified
  modified_base (13)..(13): 2'-O-methyl modified
  modified_base (14)..(14): 2'-fluoro modified
  modified_base (15)..(15): 2'-O-methyl modified
  modified_base (16)..(16): 2'-O-methyl modified
  modified_base (17)..(17): 2'-O-methyl modified
  modified_base (18)..(18): 2'-O-methyl modified
  modified_base (19)..(19): 2'-O-methyl modified
  misc_feature (20)..(22): linked via phosphorothioate
  modified_base (20)..(20): 2'-O-methyl modified
  modified_base (21)..(21): 2'-O-methyl modified
  modified_base (22)..(22): 2'-O-methyl modified
uuguuguucagcugcugcuugg

SEQ ID NO: 1216 - RNA, 22 nt, Artificial Sequence
  synthetic construct
  misc_feature (1)..(3): linked via phosphorothioate
  modified_base (1)..(1): 5'-methoxyphosphonate-4-oxy modified
  modified_base (2)..(2): 2'-fluoro modified
  modified_base (3)..(3): 2'-fluoro modified
  modified_base (4)..(4): 2'-fluoro modified
  modified_base (5)..(5): 2'-fluoro modified
  modified_base (6)..(6): 2'-O-methyl modified
  modified_base (7)..(7): 2'-fluoro modified
  modified_base (8)..(8): 2'-O-methyl modified
  modified_base (9)..(9): 2'-O-methyl modified
  modified_base (10)..(10): 2'-fluoro modified
  modified_base (11)..(11): 2'-O-methyl modified
  modified_base (12)..(12): 2'-O-methyl modified
  modified_base (13)..(13): 2'-O-methyl modified
  modified_base (14)..(14): 2'-fluoro modified
  modified_base (15)..(15): 2'-O-methyl modified
  modified_base (16)..(16): 2'-O-methyl modified
  modified_base (17)..(17): 2'-O-methyl modified
  modified_base (18)..(18): 2'-O-methyl modified
  modified_base (19)..(19): 2'-O-methyl modified
  misc_feature (20)..(22): linked via phosphorothioate
  modified_base (20)..(20): 2'-O-methyl modified
  modified_base (21)..(21): 2'-O-methyl modified
  modified_base (22)..(22): 2'-O-methyl modified
uuguuguucagcugcugcuugg

SEQ ID NO: 1217 - DNA, 4921 bp, Homo sapiens
gtcgcagccgagggaacaagccccaaccggatcctggacaggcaccccggcttggcgctgtctctccccctcggctcggagaggcccttcggcctgagggagcctcgccgcccgtccccggcacacgcgcagccccggcctctcggcctctgccggagaaacagttgggacccctgattttagcaggatggcccaatggaatcagctacagcagcttgacacacggtacctggagcagctccatcagctctacagtgacagcttcccaatggagctgcggcagtttctggccccttggattgagagtcaagattgggcatatgcggccagcaaagaatcacatgccactttggtgtttcataatctcctgggagagattgaccagcagtatagccgcttcctgcaagagtcgaatgttctctatcagcacaatctacgaagaatcaagcagtttcttcagagcaggtatcttgagaagccaatggagattgcccggattgtggcccggtgcctgtgggaagaatcacgccttctacagactgcagccactgcggcccagcaagggggccaggccaaccaccccacagcagccgtggtgacggagaagcagcagatgctggagcagcaccttcaggatgtccggaagagagtgcaggatctagaacagaaaatgaaagtggtagagaatctccaggatgactttgatttcaactataaaaccctcaagagtcaaggagacatgcaagatctgaatggaaacaaccagtcagtgaccaggcagaagatgcagcagctggaacagatgctcactgcgctggaccagatgcggagaagcatcgtgagtgagctggcggggcttttgtcagcgatggagtacgtgcagaaaactctcacggacgaggagctggctgactggaagaggcggcaacagattgcctgcattggaggcccgcccaacatctgcctagatcggctagaaaactggataacgtcattagcagaatctcaacttcagacccgtcaacaaattaagaaactggaggagttgcagcaaaaagtttcctacaaaggggaccccattgtacagcaccggccgatgctggaggagagaatcgtggagctgtttagaaacttaatgaaaagtgcctttgtggtggagcggcagccctgcatgcccatgcatcctgaccggcccctcgtcatcaagaccggcgtccagttcactactaaagtcaggttgctggtcaaattccctgagttgaattatcagcttaaaattaaagtgtgcattgacaaagactctggggacgttgcagctctcagaggatcccggaaatttaacattctgggcacaaacacaaaagtgatgaacatggaagaatccaacaacggcagcctctctgcagaattcaaacacttgaccctgagggagcagagatgtgggaatgggggccgagccaattgtgatgcttccctgattgtgactgaggagctgcacctgatcacctttgagaccgaggtgtatcaccaaggcctcaagattgacctagagacccactccttgccagttgtggtgatctccaacatctgtcagatgccaaatgcctgggcgtccatcctgtggtacaacatgctgaccaacaatcccaagaatgtaaacttttttaccaagcccccaattggaacctgggatcaagtggccgaggtcctgagctggcagttctcctccaccaccaagcgaggactgagcatcgagcagctgactacactggcagagaaactcttgggacctggtgtgaattattcagggtgtcagatcacatgggctaaattttgcaaagaaaacatggctggcaagggcttctccttctgggtctggctggacaatatcattgaccttgtgaaaaagtacatcctggccctttggaacgaagggtacatcatgggctttatcagtaaggagcgggagcgggccatcttgagcactaagcctccaggcaccttcctgctaagattcagtgaaagcagcaaagaaggaggcgtcactttcacttgggtggagaaggacatcagcggtaagacccagatccagtccgtggaaccatacacaaagcagcagctgaacaacatgtcatttgctgaaatcatcatgggctataagatcatggatgctaccaatatcctggtgtctccactggtctatctctatcctgacattcccaaggaggaggcattcggaaagtattgtcggccagagagccaggagcatcctgaagctgacccaggtagcgctgccccatacctgaagaccaagtttatctgtgtgacaccaacgacctgcagcaataccattgacctgccgatgtccccccgcactttagattcattgatgcagtttggaaataatggtgaaggtgctgaaccctcagcaggagggcagtttgagtccctcacctttgacatggagttgacctcggagtgcgctacctcccccatgtgaggagctgagaacggaagctgcagaaagatacgactgaggcgcctacctgcattctgccacccctcacacagccaaaccccagatcatctgaaactactaactttgtggttccagattttttttaatctcctacttctgctatctttgagcaatctgggcacttttaaaaatagagaaatgagtgaatgtgggtgatctgcttttatctaaatgcaaataaggatgtgttctctgagacccatgatcaggggatgtggcggggggtggctagagggagaaaaaggaaatgtcttgtgttgttttgttcccctgccctcctttctcagcagctttttgttattgttgttgttgttcttagacaagtgcctcctggtgcctgcggcatccttctgcctgtttctgtaagcaaatgccacaggccacctatagctacatactcctggcattgcactttttaaccttgctgacatccaaatagaagataggactatctaagccctaggtttctttttaaattaagaaataataacaattaaagggcaaaaaacactgtatcagcatagcctttctgtatttaagaaacttaagcagccgggcatggtggctcacgcctgtaatcccagcactttgggaggccgaggcggatcataaggtcaggagatcaagaccatcctggctaacacggtgaaaccccgtctctactaaaagtacaaaaaattagctgggtgtggtggtgggcgcctgtagtcccagctactcgggaggctgaggcaggagaatcgcttgaacctgagaggcggaggttgcagtgagccaaaattgcaccactgcacactgcactccatcctgggcgacagtctgagactctgtctcaaaaaaaaaaaaaaaaaaaagaaacttcagttaacagcctccttggtgctttaagcattcagcttccttcaggctggtaatttatataatccctgaaacgggcttcaggtcaaacccttaagacatctgaagctgcaacctggcctttggtgttgaaataggaaggtttaaggagaatctaagcattttagacttttttttataaatagacttattttcctttgtaatgtattggccttttagtgagtaaggctgggcagagggtgcttacaaccttgactccctttctccctggacttgatctgctgtttcagaggctaggttgtttctgtgggtgccttatcagggctgggatacttctgattctggcttccttcctgccccaccctcccgaccccagtccccctgatcctgctagaggcatgtctccttgcgtgtctaaaggtccctcatcctgtttgttttaggaatcctggtctcaggacctcatggaagaagagggggagagagttacaggttggacatgatgcacactatggggccccagcgacgtgtctggttgagctcagggaatatggttcttagccagtttcttggtgatatccagtggcacttgtaatggcgtcttcattcagttcatgcagggcaaaggcttactgataaacttgagtctgccctcgtatgagggtgtatacctggcctccctctgaggctggtgactcctccctgctggggccccacaggtgaggcagaacagctagagggcctccccgcctgcccgccttggctggctagctcgcctctcctgtgcgtatgggaacacctagcacgtgctggatgggctgcctctgactcagaggcatggccggatttggcaactcaaaaccaccttgcctcagctgatcagagtttctgtggaattctgtttgttaaatcaaattagctggtctctgaattaagggggagacgaccttctctaagatgaacagggttcgccccagtcctcctgcctggagacagttgatgtgtcatgcagagctcttacttctccagcaacactcttcagtacataataagcttaactgataaacagaatatttagaaaggtgagacttgggcttaccattgggtttaaatcatagggacctagggcgagggttcagggcttctctggagcagatattgtcaagttcatggccttaggtagcatgtatctggtcttaactctgattgtagcaaaagttctgagaggagctgagccctgttgtggcccattaaagaacagggtcctcaggccctgcccgcttcctgtccactgccccctccccatccccagcccagccgagggaatcccgtgggttgcttacctacctataaggtggtttataagctgctgtcctggccactgcattcaaattccaatgtgtacttcatagtgtaaaaatttatattattgtgaggttttttgtcttttttttttttttttttttttggtatattgctgtatctactttaacttccagaaataaacgttatataggaaccgtc

SEQ ID NO: 1218 - DNA, 4954 bp, Macaca fascicularis
tgcatgacggcgtgcctcggccaggctggggctgggcggggattggctgaaggggctgtaattcagcggtttccggagctgcggcggcgtagaccgggagggggagccgggggttccgacgtagcagccgagggaacaagccccaaccggatcctggacaggcaccccggctcggcgctgtctctccccctcggctcggataagccctccggcctgagggagccccgtcgcccgcccccggcgcacgcgcagccccggcctctcggcctctgctggagaaacagcaggatggcccaatggaatcagctacagcagcttgacacacggtacctggagcagctccatcagctctacagtgacagcttcccaatggagttgcggcagtttctggccccttggattgagagtcaagattgggcatatgcggccagcaaagaatcacatgccactttggtgtttcataatctcctgggcgagattgaccagcagtatagccgcttcctgcaagaatcgaatgttctctatcagcacaatctacgaagaatcaagcagtttcttcagagcaggtatcttgagaagccaatggagattgcccggattgtggcccggtgcctgtgggaagagtcacgcctcctacagactgcagccactgcggcccagcaagggggccaggccaaccaccccacagcagctgtggtgacggagaagcagcagatgctggagcagcaccttcaggatgtccggaagagagtacaggatctagaacagaaaatgaaagtggtagagaatctccaggatgactttgatttcaactataaaaccctcaagagtcaaggagacatgcaagatctgaatggaaacaaccagtcagtgaccaggcagaagatgcagcagctggaacagatgctcactgcgctggaccagatgcggagaagcatcgtgagtgagctggcggggcttttgtcagcgatggagtacgtgcagaaaactctcacagacgaggagctggctgactggaagaggcggcaacagattgcctgcattggaggtccgcccaacatctgcctagatcggctagaaaactggataacgtcattagcagaatctcaacttcagacccgtcaacaaattaagaaactggaggagttgcagcaaaaagtgtcctacaaaggggaccccattgtacagcaccggccgatgctggaggagagaatcgtggagctgttcagaaacttaatgaaaagtgcctttgtggtggagcggcagccctgcatgcccatgcatcccgaccggccccttgtcatcaagaccggcgtccagttcactaccaaagtcaggttgctggtcaaattccctgagttaaattatcaacttaaaattaaagtgtgcattgacaaagactctggggatgttgcagctctcagaggatcccggaaatttaacattctgggcacaaacaccaaagtgatgaacatggaagagtccaacaacggcagcctctctgcagaattcaaacacttgaccctgagggagcagagatgtgggaatgggggccgagccaattgtgatgcttccctgattgtgactgaggagctgcacctgatcacctttgagacagaggtatatcaccaaggcctcaagattgacctagagacccactccttgccagttgtggtgatctccaacatctgtcagatgccaaatgcctgggcgtccatcctgtggtacaacatgctgaccaacaaccccaagaacgtaaacttttttaccaagcccccaatcggaacctgggatcaagtggccgaggtcctgagctggcagttctcctccaccaccaagcgaggactgagcatcgagcagctgactacactggcggagaaactcttgggacctggcgtgaattattcagggtgtcagatcacatgggctaaattttgcaaagaaaacatggctggcaagggcttctccttctgggtctggctggacaatatcattgaccttgtgaaaaagtacatcctggccctttggaatgaagggtacatcatgggctttatcagtaaggagcgggagcgggccatcttgagcaccaagcctccaggcacctttctgctaagattcagtgaaagcagcaaagaaggcggcgtcactttcacttgggtggagaaggacatcagtggtaagacccagatccagtccgtggaaccatacaccaagcagcagttgaacaacatgtcatttgctgaaatcatcatgggctataagatcatggatgctaccaatattctggtgtctccgctggtctatctctaccctgacattcccaaggaggaggcattcggaaagtattgtcggccagagagccaggagcatcctgaagctgacccaggcgccgccccatacctgaagaccaagtttatctgtgtgacaccattcattgatgcagtttggaaataatggtgaaggtgctgaaccctcagcaggagggcagtttgagtccctcacctttgacatggagttgacctcggagtgtgctacctcccccatgtgaggagctgagaacggaagctgcaaaagatacgactgaggcgcctacctgtgttccgccacccctcacacagccaaaccccagatcatctgaaactactaactttgtggttccagattttttttaatctcctacttctgctatctttgagcaatctgggcacttttaaaaataagagaaatgagtgaatgtgggtgatctgcttttatctaaatgcaaataaggatgtgttctctgagacccgtgatggggggatgtggcggggggtggctagagggagaaaaaggaaatgtcttgtgttgttttgttcccctgccctcctttctcagcagctttttgttattgttgttgttgttcttagacaagtgcctcctggtgcccgcggcatccttctgcctgtttctgtaagcaaatgccacaggccacctgtagctacatactcctggcattgcactttttaaccttgctgacatccaaatagaagataggactatctgagccctaggtttctttttaaattaagaaataagaacaattaaagggcaaaaaacactgtttcagcatagcctttctgtatttaagaaacttcagcagccggccgcagggactcacgcctgtaatcccagcactttgggaggccgaggtgggtggatcatgaggttaggagatcaagactgtcctggctaacatggtgaaaccccgtctctactaacagtacaaaaaattagccgggcgtggtggtgggtgcctgtagtcccagctactcgggaggctgaggcaggagaatggcatgaacccaagaggcggaggttgcagtgagccaaaatcacaccactgcactccaactcaggcaacagtgtgagactccatctcaaaaaaaaaagaaaagaaaaagaaacttcagttaacagcctccttggtgctttaagcattcagcttccttcaggttgataatttatataacccctgaaacaggcttcaggtcaaacccttaaaagacgtctgaagctgcagcctggcctttgatgttgaaataggaaggtttaaggagaatctaagcattttagacttttttttataaatagacttctattttcctttgtaatgtattggtcttttagtgggtaaggctgggcagagggtgcttacaaccttgactccctttctccctggacttgatctgctgtttcagaggctaggttgtttctgtgggtgccttatcagggctgggatacttctgatttgggcttccttcttgccccaccctcccgaccccagttcccctgaccctgctagtggcatgtctcctcccatgtctgaaggtccctcgtcctgtttgttttaggaatcctggtctcaggacctcatggaagaagagggggagaaagttaccagttggatatgatgcagactatggggccccagcgacgtgtctggttgagctcagggaatatggttcttagcccagtttcttggtgatttccagcggtcagttcaggcagggcaaaggcttactgataaacttgagtctgccctcgtatgagggttatagctggcctccctctgaggctggtgactcttccctgctggggccccacaggtgagacagaacaggtagagggcctccctgtctgcccgccttggccagctagcttgcctctcctgtgcgtatgggaacacctagcacgtgctgggtgggctgcctctgacccagaggcatggccgaatttggcgactcaaaaccaccttgcctcagctgatcagagtttctgtggaattctgattgttagatcaaattagctggcctctgaattaagtgggagaggaccttctctaagatgaaccgggttcgccccagtcctcctgcctggagacagttgatgtgtcttgcagagctctcgcttccccagcaacactcttcagtacataataagcttaactgataaacagagagaatatttaggaaggtgagtcttgggcttaccattgggtttaaatcatagggacctcgggaaagggttcgggcttctctggagcagatattatgaagttcatggccttaggtagcatgtgtatctggtcttaactctgattgtagcaaaagttctgagaggagctgagccttgttctggccccttaaagaacagggtcctcaggccctgcccgcttcctgtccactgccctcctgcccgtccccagcccagctgagggaatcccgtgggttgcttacctacctataaggtggtttataagctgctgtcctggccactgcattcaaattccaatgtgtacttcatagtgtaaaaatttatattattgtggggttttttgtcttttttttttttttttttttggtatattgctgtatctactttaacttccagaaataaacgttatataggaaccgtc

SEQ ID NO: 1219 - DNA, 20 bp, Artificial Sequence
  synthetic construct
ttgtgtttgtgcccagaatg

SEQ ID NO: 1220 - DNA, 23 bp, Artificial Sequence
  synthetic construct
tccctgagttgaattatcagctt

SEQ ID NO: 1221 - DNA, 25 bp, Artificial Sequence
  synthetic construct
  misc_feature (1)..(1): FAM dye attached
  misc_feature (9)..(9): ZEN Quencher moiety attached
  misc_feature (25)..(25): IABkFQ quencher moiety attached
acgtccccagagtctttgtcaatgc

SEQ ID NO: 1222 - DNA, 25 bp, Artificial Sequence
  synthetic construct
gatgatttcagcaaatgacatgttg

SEQ ID NO: 1223 - DNA, 21 bp, Artificial Sequence
  synthetic construct
cagtgaaagcagcaaagaagg

SEQ ID NO: 1224 - DNA, 24 bp, Artificial Sequence
  synthetic construct
  misc_feature (1)..(1): FAM dye attached
  misc_feature (9)..(9): ZEN Quencher moiety attached
  misc_feature (24)..(24): IABkFQ quencher moiety attached
aggacatcagcggtaagacccaga

SEQ ID NO: 1225 - RNA, 22 nt, Artificial Sequence
  synthetic construct
  misc_feature (1)..(3): linked via phosphorothioate
  modified_base (1)..(1): 5'-methoxyphosphonate-4-oxy modified
  modified_base (2)..(2): 2'-fluoro modified
  modified_base (3)..(3): 2'-fluoro modified
  modified_base (4)..(4): 2'-fluoro modified
  modified_base (5)..(5): 2'-fluoro modified
  modified_base (6)..(6): 2'-O-methyl modified
  modified_base (7)..(7): 2'-fluoro modified
  modified_base (8)..(8): 2'-O-methyl modified
  modified_base (9)..(9): 2'-O-methyl modified
  modified_base (10)..(10): 2'-fluoro modified
  modified_base (11)..(11): 2'-O-methyl modified
  modified_base (12)..(12): 2'-O-methyl modified
  modified_base (13)..(13): 2'-O-methyl modified
  modified_base (14)..(14): 2'-fluoro modified
  modified_base (15)..(15): 2'-O-methyl modified
  modified_base (16)..(16): 2'-O-methyl modified
  modified_base (17)..(17): 2'-O-methyl modified
  modified_base (18)..(18): 2'-O-methyl modified
  modified_base (19)..(19): 2'-O-methyl modified
  misc_feature (20)..(22): linked via phosphorothioate
  modified_base (20)..(20): 2'-O-methyl modified
  modified_base (21)..(21): 2'-O-methyl modified
  modified_base (22)..(22): 2'-O-methyl modified
uauaguugaaaucaaagucagg

SEQ ID NO: 1226 - RNA, 22 nt, Artificial Sequence
  synthetic construct
  misc_feature (1)..(3): linked via phosphorothioate
  modified_base (1)..(1): 5'-methoxyphosphonate-4-oxy modified
  modified_base (2)..(2): 2'-fluoro modified
  modified_base (3)..(3): 2'-fluoro modified
  modified_base (4)..(4): 2'-fluoro modified
  modified_base (5)..(5): 2'-fluoro modified
  modified_base (6)..(6): 2'-O-methyl modified
  modified_base (7)..(7): 2'-fluoro modified
  modified_base (8)..(8): 2'-O-methyl modified
  modified_base (9)..(9): 2'-O-methyl modified
  modified_base (10)..(10): 2'-fluoro modified
  modified_base (11)..(11): 2'-O-methyl modified
  modified_base (12)..(12): 2'-O-methyl modified
  modified_base (13)..(13): 2'-O-methyl modified
  modified_base (14)..(14): 2'-fluoro modified
  modified_base (15)..(15): 2'-O-methyl modified
  modified_base (16)..(16): 2'-O-methyl modified
  modified_base (17)..(17): 2'-O-methyl modified
  modified_base (18)..(18): 2'-O-methyl modified
  modified_base (19)..(19): 2'-O-methyl modified
  misc_feature (20)..(22): linked via phosphorothioate
  modified_base (20)..(20): 2'-O-methyl modified
  modified_base (21)..(21): 2'-O-methyl modified
  modified_base (22)..(22): 2'-O-methyl modified
uuaauuuuaagcugauaauugg

SEQ ID NO: 1227 - RNA, 22 nt, Artificial Sequence
  synthetic construct
  misc_feature (1)..(3): linked via phosphorothioate
  modified_base (1)..(1): 5'-methoxyphosphonate-4-oxy modified
  modified_base (2)..(2): 2'-fluoro modified
  modified_base (3)..(3): 2'-fluoro modified
  modified_base (4)..(4): 2'-fluoro modified
  modified_base (5)..(5): 2'-fluoro modified
  modified_base (6)..(6): 2'-O-methyl modified
  modified_base (7)..(7): 2'-fluoro modified
  modified_base (8)..(8): 2'-O-methyl modified
  modified_base (9)..(9): 2'-O-methyl modified
  modified_base (10)..(10): 2'-fluoro modified
  modified_base (11)..(11): 2'-O-methyl modified
  modified_base (12)..(12): 2'-O-methyl modified
  modified_base (13)..(13): 2'-O-methyl modified
  modified_base (14)..(14): 2'-fluoro modified
  modified_base (15)..(15): 2'-O-methyl modified
  modified_base (16)..(16): 2'-O-methyl modified
  modified_base (17)..(17): 2'-O-methyl modified
  modified_base (18)..(18): 2'-O-methyl modified
  modified_base (19)..(19): 2'-O-methyl modified
  misc_feature (20)..(22): linked via phosphorothioate
  modified_base (20)..(20): 2'-O-methyl modified
  modified_base (21)..(21): 2'-O-methyl modified
  modified_base (22)..(22): 2'-O-methyl modified
uuuaauuuuaagcugauaaugg

SEQ ID NO: 1228 - RNA, 22 nt, Artificial Sequence
  synthetic construct
  misc_feature (1)..(4): linked via phosphorothioate
  modified_base (1)..(1): 5'-methoxyphosphonate-4-oxy modified
  modified_base (2)..(2): 2'-fluoro modified
  modified_base (3)..(3): 2'-fluoro modified
  modified_base (4)..(4): 2'-fluoro modified
  modified_base (5)..(5): 2'-fluoro modified
  modified_base (6)..(6): 2'-O-methyl modified
  modified_base (7)..(7): 2'-fluoro modified
  modified_base (8)..(8): 2'-O-methyl modified
  modified_base (9)..(9): 2'-O-methyl modified
  modified_base (10)..(10): 2'-fluoro modified
  modified_base (11)..(11): 2'-O-methyl modified
  modified_base (12)..(12): 2'-O-methyl modified
  modified_base (13)..(13): 2'-O-methyl modified
  modified_base (14)..(14): 2'-fluoro modified
  modified_base (15)..(15): 2'-O-methyl modified
  modified_base (16)..(16): 2'-O-methyl modified
  modified_base (17)..(17): 2'-O-methyl modified
  modified_base (18)..(18): 2'-O-methyl modified
  modified_base (19)..(19): 2'-O-methyl modified
  misc_feature (20)..(22): linked via phosphorothioate
  modified_base (20)..(20): 2'-O-methyl modified
  modified_base (21)..(21): 2'-O-methyl modified
  modified_base (22)..(22): 2'-O-methyl modified
uauucuuccauguucaucacgg

SEQ ID NO: 1229 - DNA, 4520 bp, Mus musculus
aattatgcatggaggcgtgtcttggccagtggcggctgggtggggattggctggaggggctgtaattcagcggtttccggagctgcagtgtagacagggagggggaacctggggttccgacgtcgcggcggagggaacgagccctaaccggatcgctgaggtacaaccccgctcggtgtcgcctgaccgcgtcggctaggagaggccaggcggccctcgggagcccagcagctcgcgcctggagtcagcgcaggccggccagtcgggcctcagccccggagacagtcgagacccctgactgcagcaggatggctcagtggaaccagctgcagcagctggacacacgctacctggagcagctgcaccagctgtacagcgacagcttccccatggagctgcggcagttcctggcaccttggattgagagtcaagactgggcatatgcagccagcaaagagtcacatgccacgttggtgtttcataatctcttgggtgaaattgaccagcaatatagccgattcctgcaagagtccaatgtcctctatcagcacaaccttcgaagaatcaagcagtttctgcagagcaggtatcttgagaagccaatggaaattgcccggatcgtggcccgatgcctgtgggaagagtctcgcctcctccagacggcagccacggcagcccagcaagggggccaggccaaccacccaacagccgccgtagtgacagagaagcagcagatgttggagcagcatcttcaggatgtccggaagcgagtgcaggatctagaacagaaaatgaaggtggtggagaacctccaggacgactttgatttcaactacaaaaccctcaagagccaaggagacatgcaggatctgaatggaaacaaccagtctgtgaccagacagaagatgcagcagctggaacagatgctcacagccctggaccagatgcggagaagcattgtgagtgagctggcggggctcttgtcagcaatggagtacgtgcagaagacactgactgatgaagagctggctgactggaagaggcggcagcagatcgcgtgcatcggaggccctcccaacatctgcctggaccgtctggaaaactggataacttcattagcagaatctcaacttcagacccgccaacaaattaagaaactggaggagctgcagcagaaagtgtcctacaagggcgaccctatcgtgcagcaccggcccatgctggaggagaggatcgtggagctgttcagaaacttaatgaagagtgccttcgtggtggagcggcagccctgcatgcccatgcacccggaccggcccttagtcatcaagactggtgtccagtttaccacgaaagtcaggttgctggtcaaatttcctgagttgaattatcagcttaaaattaaagtgtgcattgataaagactctggggatgttgctgccctcagagggtctcggaaatttaacattctgggcacgaacacaaaagtgatgaacatggaggagtctaacaacggcagcctgtctgcagagttcaagcacctgacccttagggagcagagatgtgggaatggaggccgtgccaattgtgatgcctccttgatcgtgactgaggagctgcacctgatcaccttcgagactgaggtgtaccaccaaggcctcaagattgacctagagacccactccttgccagttgtggtgatctccaacatctgtcagatgccaaatgcttgggcatcaatcctgtggtataacatgctgaccaataaccccaagaacgtgaacttcttcactaagccgccaattggaacctgggaccaagtggccgaggtgctcagctggcagttctcgtccaccaccaagcgggggctgagcatcgagcagctgacaacgctggctgagaagctcctagggcctggtgtgaactactcagggtgtcagatcacatgggctaaattctgcaaagaaaacatggctggcaagggcttctccttctgggtctggctagacaatatcatcgaccttgtgaaaaagtatatcttggccctttggaatgaagggtacatcatgggtttcatcagcaaggagcgggagcgggccatcctaagcacaaagcccccgggcaccttcctactgcgcttcagcgagagcagcaaagaaggaggggtcactttcacttgggtggaaaaggacatcagtggcaagacccagatccagtctgtagagccatacaccaagcagcagctgaacaacatgtcatttgctgaaatcatcatgggctataagatcatggatgcgaccaacatcctggtgtctccacttgtctacctctaccccgacattcccaaggaggaggcatttggaaagtactgtaggcccgagagccaggagcaccccgaagccgacccaggtagtgctgccccgtacctgaagaccaagttcatctgtgtgacaccaacgacctgcagcaataccattgacctgccgatgtccccccgcactttagattcattgatgcagtttggaaataacggtgaaggtgctgagccctcagcaggagggcagtttgagtcgctcacgtttgacatggatctgacctcggagtgtgctacctcccccatgtgaggagctgaaaccagaagctgcagagacgtgacttgagacacctgccccgtgctccacccctaagcagccgaaccccatatcgtctgaaactcctaactttgtggttccagatttttttttttaatttcctacttctgctatctttgggcaatctgggcactttttaaaatagagaaatgagtgagtgtgggtgataaactgttatgtaaagaggagagcacctctgagtctggggatggggctgagagcagaagggagcaaggggaacacctcctgtcctgcccgcctgccctcctttttcagcagctcggggttggttgttagacaagtgcctcctggtgcccatggcatcctgttgccccactctgtgagctgataccccaggctgggaactcctggctctgcactttcaaccttgctaatatccacatagaagctaggactaagcccagaggttcctctttaaattaaaaaaaaaaaaaataagaattaaagggcaaaacacactgacacagcatagcctttccatatcaaggaatactcagttaacagcctctccagcgctgtcttcaggctgatcatctatataaaccctggaatggttgcagatcaaatctgtaaaagagatccgagagctgtggcttggcctctggttcaaacacaaaggctagagagaacctagatatccctgggttttgtttacccagtatgcttgtcggttggaggtgtgaggtaggccaagggcactggaaagcctttgtcatcaccctactccctccccaacccagactccagaccctgtttcagggtcagcctgccctgtgggtgccttactgggcctagggtcaacctgccttcctttcccacttgaccttgctggtagtatgtccccttcccatgtccaaaggccctctgtcctgcttctattgggaatccctgcctcaggaccttgtgtcgagagggattgccttacaggtttgaacctgcctcagactacaggccctcagcaaagctcagggagtatggtccttattctatgcgcttggttcccagggatatctgtaaccacagggcaaaagctgacatatactccaggtctgccctcatatgagtggtgtattcttggcctcccctgagactggcaactgtctgctccccattgggtctcccaggtgaggtggaacacagttcctgcacctactgtggcctccatgtcgcttgcttgcttcgctcactcagcttactggaacactgagtgttcaaggcaagcctttcctgacagaggcatggctagattcagtgactcaaagccacctcattcagctgatcagtgtctgtggaattgtttccttccagttaaccagtgtctgaattaagggcagtgaggacattgtctccaagacgaactgcttgccttgaccaccccagccttctgcttcgagacagttactgctctcccaccccatcaatgttctttagttatacaataagctgaacttataaactgaaagggtatttaggaaggcaaggcttgggcatttttatggctttcaatcctggggacccaggaacaaggtgagggcttctctggggctggtgttgtacctcaggggctctgggaagtctgtgtgcctgggttaaccacccatagtgagcccctggaactgcccactttccctctccttggccccacttggccccagcctcacccagcctgcagactgcttagcctttcagtgcagtggcttgtgttctggccactgcactcagattccaatgtaaactttctagtgtaaaaatttatattattgtgggttgttttttgttgttgtttgtttttgtatattgctgtaactactttaacttccagaaataaagattatataggaactgtctggc
